United States Patent Application Publication US 2019/0144922 A1 - sequence listing, part 9

SEQ ID NO: 4 - DNA, 5974109 bp, Klebsiella oxytoca (residues 1-1,991,370 of 5,974,109)
  misc_feature (5617061)..(5617061): n is a, c, g, or t
atgaagatgtggatgaaagcagggagtaaaaggcagaaatgaccgcggagataggttttatgggtaaaccgatgtccggtcggttcagacgacaaaaactcaaaaagcccatccgtcaggatgggctcttcacttgtttgatgcctggcagttccctactctcacatggggagaccccacactaccatcggcgctacggcgtttcacttctgagttcggcatggggtcaggtgggaccaccgcgctagtgccgccaggcaaattctgttgtcagaaacgaatcttttacaccgatgctgcgttggctgcattcgtaaagtcagtcacatactacagtatgctccttcctttacttcatttgccgccttgcctcagcgtaaaatctttcgttcccgaaaatctgtaatcaatgctgaaattgttgtcttctcaaatcgccaaaacatcttcggcgttgtaaggttaagcctcacggttcattagtaccggttagctcaacgcatcgctgcgcttacacacccggcctatcaacgtcgtcgtcttcaacgttccttcaggacccttaaagggtcagggagaactcatctcggggcaagtttcgtgcttagatgctttcagcacttatctcttccgcatttagctaccgggcaatgccattggcatgacaacccgaacaccagtgatgcgtccactccggtcctctcgtactaggagcagcccccctcaattctccagcgcccacggcagatagggaccgaactgtctcacgacgttctaaacccagctcgcgtaccactttaaatggcgaacagccatacccttgggacctacttcagccccaggatgtgatgagccgacatcgaggtgccaaacaccgccgtcgatatgaactcttgggcggtatcagcctgttatccccggagtaccttttatccgttgagcgatggcccttccattcagaaccaccggatcactatgacctgctttcgcacctgctcgcgccgtcacgctcgcagtcaagccagcttatgccattgcactaacctcctgatgtccgaccaggattagctgaccttcgtgctcctccgttactctttaggaggagaccgccccagtcaaactacccaccagacactgtccgcaaccccgatcaggggcccacgttagaacaccagccattaaagggtggtatttcaaggatggctccatgcagactggcgtccacacttcaaagcctcccacctatcctacacatcaaggaccagtgttcagtgtcaagctatagtaaaggttcacggggtctttccgtcttgccgcgggtacactgcatcttcacagcgagttcaatttcactgagtctcgggtggagacagcctggccatcattacgccattcgtgcaggtcggaacttacccgacaaggaatttcgctaccttaggaccgttatagttacggccgccgtttaccggggcttcgatcaagagcttctccgcgaggataaccccatcaattaaccttccggcaccgggcaggcgtcacaccgtatacgtccactttcgtgtttgcacagtgctgtgtttttaataaacagttgcagccagctggtatcttcgactgatttcagcttcatgagcaagtcacttcacttaccatcagcgtgccttctcccgaagttacggcaccattttgcctagttccttcacccgagttctctcaagcgccttggtattctctacctgaccacctgtgtcggtttggggtacgatttgatgttacctgatgcttagaggcttttcctggaagcagggcatttgtcacttcagcaccgtagtgcctcgtcatcacacctcagcgttagtgacgctccggatttacctggaacatccgcctacatgcttaaaccgggacaaccgtcgcccggccaacatagccttctccgtccccccttcgcagtaacaccgagtacaggaatattaacctgtttcccatcgactacgcctttcggcctcgccttaggggtcgactcaccctgccccgattaacgttggacaggaacccttggtcttccggcgtgcgggtttttcacccgcattatcgttacttatgtcagcattcgcacttctgatacctccagcaaccctcacaggccaccttcaacggcttacagaacgctcccctacccaacaacacatagtgtcgctgccgcagcttcggtgcatggtttagccccgttacatcttccgcgcaggccgactcgaccagtgagctattacgctttctttaaatgatggctgcttctaagccaacatcctggctgtctgggccttcccacatcgtttcccacttaaccatgactttgggaccttagctggcggtctgggttgtttccctcttcacgacggacgttagcacccgccgtgtgtctcccgtgataacattcttcggtattcgtagtttgcatcgggttggtaagtcgggatgaccccctagccgaaacagtgctctacccccgaagatgagttcacgaggcgctacctaaatagctttcggggagaaccagctatctcccggtttgattggcctttcacccccagccacaagtcatccgctaatttttcaacattagtcggttcggtcctccagttagtgttacccaaccttcaacctgcccatggctagatcaccgggtttcgggtctataccctgcaacttaacgcccagttaagactcggtttccctgcggctcccctatacggttaaccttgctacagaatataagtcgctgacccattatacaaaaggtacgcagtcaccccaccccaaaacgctccactgcctgattctggatgttgaacgtcgcttacgctccgttaaccgtccatcatgctgtcgttacgcattttgcgcaccacgcaaagcgaaacgctttggtggtggggctcctactgcttgtacgtacacggtttcaggttctttttcactcccctcgccggggttcttttcgcctttccctcacggtactggttcactatcggtcagtcaggagtatttagccttggaggatggtccccccatattcagacaggataccacgtgtcccgccctactcttcgagttcacagcctgtgtgttttagtgtacgggagtatcaccctgtaccctgcgactttccagacgcttccactaacacacaagctgattcagactccgggctgctccccgttcgctcgccgctactgggggaatctcggttgatttcttttcctcggggtacttagatgtttcagttcccccggttcgcctcgttaacctatgtattcagttaacgatagtgcaacgaattgcactgggtttccccattcggacatcgccggctgtaacggttcatatcaccttaccgacgcttttcgcagattagcacgtccttcatcgcctctgactgccagggcatccaccgtgtacgcttagtcgcttaacctcacaacccgaagatgtttcgtaaaacatcgtcgtgtcgcgaaaatttgagagactcgaacacacttgaacagtgtgtcgtttcaattttcagcttgatccagatttttaaagagcaaatatctcaaacgtcacccgaagatgagttttgagatatcggttggttgtgcctttcactcacagccagcaagtggcgtcccctaggggattcgaacccctgttgccgccgtgaaagggcggagtcctaaccgctagacgaaggggacacgaggtgtcgcgacttcgcagccgtcttgcttctttacatctatcagacaatctgtgtgagcactacaaaggcaggttctttaaggtaaggaggtgatccaaccgcaggttcccctacggttaccttgttacgacttcaccccagtcatgaatcacaaagtggtaagcgccctcccgaaggttaagctacctacttcttttgcaacccactcccatggtgtgacgggcggtgtgtacaaggcccgggaacgtattcaccgtggcattctgatccacgattactagcgattccgacttcatggagtcgagttgcagactccaatccggactacgacatactttatgaggtccgcttgctctcgcgaggtcgcttctctttgtatatgccattgtagcacgtgtgtagccctactcgtaagggccatgatgacttgacgtcatccccaccttcctccagtttatcactggcagtctcctttgagttcccgaccgaatcgctggcaacaaaggataagggttgcgctcgttgcgggacttaacccaacatttcacaacacgagctgacgacagccatgcagcacctgtctcacggttcccgaaggcaccaaagcatctctgctaagttccgtggatgtcaagagtaggtaaggttcttcgcgttgcatcgaattaaaccacatgctccaccgcttgtgcgggcccccgtcaattcatttgagttttaaccttgcggccgtactccccaggcggtcgacttaacgcgttagctccggaagccactcctcaagggaacaacctccaagtcgacatcgtttacagcgtggactaccagggtatctaatcctgtttgctccccacgctttcgcacctgagcgtcagtctttgtccagggggccgccttcgccaccggtattcctccagatctctacgcatttcaccgctacacctggaattctacccccctctacaagactccagcctgccagtttcgaatgcagttcccaggttgagcccggggatttcacatccgacttgacagaccgcctgcgtgcgctttacgcccagtaattccgattaacgcttgcaccctccgtattaccgcggctgctggcacggagttagccggtgcttcttctgcgggtaacgtcaatcgacaaggttattaaccttatcgccttcctccccgctgaaagtactttacaacccgaaggccttcttcatacacgcggcatggctgcatcaggcttgcgcccattgtgcaatattccccactgctgcctcccgtaggagtctggaccgtgtctcagttccagtgtggctggtcatcctctcagaccagctagggatcgtcgcctaggtgagccgttaccccacctactagctaatcccatctgggcacatctgatggcaagaggcccgaaggtccccctctttggtcttgcgacgttatgcggtattagctaccgtttccagtagttatccccctccatcaggcagtttcccagacattactcacccgtccgccactcgtcacccgagagcaagctctctgtgctaccgttcgacttgcatgtgttaggcctgccgccagcgttcaatctgagccatgatcaaactcttcaatttaagtttgatgctcgtagaattaaacttcgtaatgaattacgtgttcactctttgagacttggtgttcattttcgtccgaggacgttaagaatccatgtcactttgagtgcccacacagattgtctgataaattgttaaagagcagtgcaacgcggctttcgctcaccgttgcgaggtcccgtataatacgttttcctcactcagagtcaagcgcttatttttgcttttctctgccggtattcatcgctgaataccgctgacccggcgggctgtaagccgttgttccgtgtcagtggaggcgcattatagggagtaattctgaagtggcaagaggaatttcaaaaaaaaactccacccgcttatttttcaaccaaagctgcagctgagaatacattatcgcctggtttttaaacaaaaacgagcccggcgggcccgtttttgctgttttgtgatttactgcactgccactatccggtcgtttttcacaaccagctgcacttctttacccggtattagctcaccagagagaatctgctgcgccaacgggttttcgatctgctgctggatagcacgtttcagaggacgtgcgccataaaccggatcgtaaccgttttcgctcagcagcttcagtgcctcatcagagaggtgaacttcatagccgcgttcctcaagtcgtttatacaaccgctgcagctgaatctgcgcaatagaagcaatgtgtttttcacctaacgggtggaataccaccacttcatcaatacggttgataaactccggccggaagctttggctaaccacgcccagaaccagctctttcatgtggctatagtccagggcaccaaaacgttcctgaatgagatccgaaccgaggttagaggtcatgatgacgaccgtattgcggaagtcgaccgttctcccctgcccgtcagtcaaacgtccatcgtccagtacctgcagcagaatgttaaagacatccggatgcgctttttccacttcatccagcaggatgacggaataaggacgacggcggaccgcttcagtgagatagccgccttcttcataaccgacgtatcccggaggcgccccaaccagacgtgaaacggagtgtttctccataaactctgacatgtcgatacgtaccatcgcatcgtcgctatcaaacataaagttggccagcgctttacagagttctgttttacctacaccggtagggcccaggaacaggaacgagccaattggacgattaggatcggataatccggcacggctacggcggatcgcattcgataccgcttcgaccgcttcgttctgaccaatgacgcgactatgcagctcctgctccatacgcagcagcttctcacgctcgccttccagcattctggccaccgggatacccgtccagcgagccagcacttccgcgatttccgcatccgtaactttattacgcaacagacgcatcgtcttgccttcggattgcgttgccgccgccagctgtttttccagctccgggattttgccatactgcagctcggacatccgcgccagatcgccgacgcgacgcgcctgctcaatagcgattttcgcctgttccagctcagccttaatcgtctgggttccggagagcgatgctttttcagccttccactcttcttctaagactgaatattgacgttctttatcggccagttcctcattcagcatatccagccgcttaatgctggcttcatcagactctttcttcagcgcctgctgttccagcttgagctgaatgatgcgacggtcgagtctgtccagctcttccggttttgagtcaatctgcatccgaatgctggaagcggcttcatcgatcaggtcgatagctttatccggcagctgtcggtcggcgatatagcgatgagacagcgtggctgccgcaacaatcgccgggtcggtgatctgcacgtggtggtgcagttcataacgttctttcagaccacgcaaaatcgcaatggtatcttcaacggtcggctccgccacgaatactttctggaaacgacgttccagcgcggcgtctttctcaatgtactgacgatattcatccagcgtcgtagcgcccacgcagtgcagctcaccgcgcgccagcgccggtttcagcatgttaccggcgtccattgcgccatccgctttacccgcacccaccatggtgtgcagctcatcgataaacaggatgacgttgccttcctgcttggcgaggtcattcagaacgccttttaagcgctcttcaaactcaccgcggtatttggcacccgccaccagcgcgcccatatcaagcgccagcacccggcgccccttcagcccttccggcacttcaccgttgacgatccgctgcgccagcccttcaacaatggccgttttacctacaccgggttcaccaatcagcaccgggttgtttttggtacggcgctgcagaacctgaatcgtacgacgaatttcttcatcgcggccaatcaccgggtcaagcttgccctgctcagcacgttcggtcagatcgacggtaaattttttcaaggcctgacgttggtcttcggctccctgatcgttcacgctttcacctccgcgcatttgttcgatcgcctgactcacgttggcggttgtggccccggcggattttaaaaggtcggtcagcgtgccgcgtgattcaagcgctgccagaacgaacagctctgacgaaataaagttgtcctttctcttttgcgccagcttgtcgcaaaggttcagaatacgcactaaatcctgggacggttgaacatcgccgccggtaccttccacctgcggcaatcggctcaacgcctgttcaatattggtgcgcaactctccggcattgatgcccgccgaagttaataaaggacgtatcgatcccccttcctgattcagcaaggcgctcataagatgaagaggttcgatgaattggttgtcgtgcccgagtgcaagggactgggcatcggcaagagcaagctggaatttattggtaagacgatccagacgcataactcctcccataacaggtcaaatttgctactggagattaaatgaggtcatccctcaattattcaaggttaaagacctgaactatgcaaaaataagtttgccttctggatcgtcttagttcgggaggttatatcagccagatgaaacttgccatacgacccgtcgtcttgtcgcgacgataagagaaaaaatcatctttttcgctgagggtacagcggtcaccgccaaaaatctgctcaacgccaacgctcgccagccgctgacgcgcaagctgatagatatcagcaaaatacttttcacctgcaggacgaaatgcgcgctccgcctgagtatcttttgccataaaggcctcacgcacctccggaccaacctcaaacgcgtccggcccaatggcaggaccaagccaggccatgatgttttccggtttatcggcaaaacaggctacggtttcttccagcacgccttcacaaaggccccgccagccggcatgagcagccgcgacttccgttcccgcgcggttgcaaaaaagcaccggcaggcaatcagcggtcatcaccgcgcataccgtacccggcacattgcagtatgaagcatcagcacgctttgactcgtacggcccgccgtcgagctttaacactgccgtaccgtgaacctgctccagccacaccgggtatgacggaagaccgccagcggcgaacatacgccgacggttctcttctacgtgctgcagattgtctccgcaatgggctccgaggttaagtgaatcgtatggcgacaaactcaccccaccagcgcgcgtggaactacaggctgccacgccttccggcattggccattgcggtacaatcagtttagtcatagccagtcaatatcgtctttatgggtttcaaaatcagcgcgcatggcatcaatcaaatcaaccatatcctgtggaattggcgcatgccattccatctcaatgccgctgatcggatggtataaacgcagcatggtggcatgcagggcctggcgatcgaacttacgcagagcggtgatgaactcttccgatgcgcctttaggcggacgcgggcgcccgccatagacctgatcgcccaccagcgggtgagtgatgtgcgccatgtgtacgcgaatctgatgcgtacggccagtctccaggcgcaaacgcagacgagtatgaatgcgaaaatgctccatgatccgatagtgcgtcaccgccggttttcccatgggatgtaccgccatatgcgtacgcttggtcgggtggcggctaatcggttcttccaccgttccgccagcggtcatgtgaccaatcgccaccgcttcatactcgcgggtgatttcgcgcagctgcagggattccaccaggcgggtttgcgccggaatggtcttcgcgaccaccatcaagccggtggtgtctttatcaagacggtgcacgatccccgcacgcggcacgtcagcaatggccggatagtagtgcaacagcgcattcagcacagtaccgtcagggttgcccgcgccagggtgcacaactaaatcgcgcggtttattaattacgaggatgtcatcatcttcataaacgatattgagcggaatatcctgtggttggaaacggacttcttcttcgatttcaacatcgatagcaatcgtttctccccccagcactttctctttcggcttgtcgctgacgctgccgtttaccagcactctctggtcaaggatccattcttttatgcgcgaacgcgaataatccgggaacaattcggccaaagcctgatctaagcgttgtccgagttgattttcggacaccgttgcgttgagttgtactcgttgtgccatatacagcttcttcgttttaacgttgggttttacggctttgccgtttaatatagtgtgctattgtagctggtcttaatcgggagcaggaacagagattctcccgcataaacattttgaggaagtcaaaacgtcatgacgcgcatgaaatacctggtggcagcagccacactgagcctggctttggtgggttgctctggctcaaaggaggaggtgcccgataatccgccgaatgagatctacgcgaccgctcagcaaaagctgcaggacggtaactggaaacaggcaataacgcaactggaagcgttggataaccgttatccctttggaccttattcccaacaggtacagttggatctgatttatgcgtactacaaaaacgccgatctgccgttggctcaggcagctatcgatcgctttgtgcgcctgaaccctacccatcctaacattgattacgtcatttatatgcgtggtctgacaaatatggcgttggatgacagtgcgctgcagggcttcttcggtgtcgatcgttctgaccgcgatccacaacacgcgcgcgatgcctttaacgacttctccaaactggttcgtggctatcctaacagccagtacgctactgacgcctacaagcgtatggtgttcctgaaagatcgtctggcgaagtacgagctgtcggtcgtggattactataccgatcgtggcgcatgggttgcggtcgttaaccgcgtagacggcatgctgcgtaactatccggatacgcaggccacccgcgacgcgcttccgaaaatggaaaacgcctaccgtcagatgcagatgaacgcgcaggctgacaaggttgcgaaaatcatcgcggctaacagcaagaacacctgatagcccttagataagcaaaacggcagccgagtggctgccgtttttttattcgttaaattgttaagctgaagcggtttagcgccgagttaactcatcaaatatggctctctttcttccattccacaagtaaaatctcacctgttcctgtcctgtctcacaaaacagatttgttgacaaaaagtgacaataaaatgtgatttaaatcacgcattttgacattgggcgaggtatgctgagtttaccaagacgggaaagacaagaggtaaaatttatgacaatgaacattaccagtaaacaaatggaaattactccggcaatccgccagcacgtcgcagaccgtctcgccaaactggataaatggcaaacccacttaattaacccgcacatcatcctctctaaggagccgcagggttttgtcgctgacgcaaccatcaatacgccaaacgggcacctggtcgccagcgcacggcacgaagacatgtatgccgcaattaacgaattgatcaacaagctggaacggcagctcaataaagtgcaacacaaaggggaagcccgccgcgccgcaacgtcggtgaaagaggctggctttgtggaagaagaagagtaatccttaacttaagcttgtgtcatgccacgcgccttcgggcgcgttttttattgacagagtgaaaacagtacaggtactgtaatccccactaactcaaggaattcatcgtgaaactgatcccgtttttcttcgcattcttttttaccttcccctgaatgggaggcaattcgtcgtgtgataaagaatgcgaagacgaacaacaaggcctcccaaacgggaggccttttttattgataatcaataacaagaaaggcaacacatatgaccgaggaaaacccattactggccctacgcgataagatcagcgctctggatgagaaactgcttgcgctgctggctgagcgccgcggcctggccgtcgaggtcggcaaagccaagctggcatcgcaccggccggtgcgggatatcgaccgcgagcgggacctgctggaacgcctgatgacgctggggaaaaaacaccatcttgatgcccattacatcacgcgcctgttccagctgatcattgaagactcggtccttacccaacaaacgctgctgcaacagcacctgaataaaattaatccgcactccgcgcgggtggcattcctcggacctaaaggttcatattcgcaccttgcggctcgtcagtacgccgcccgccactttgaacagtttatcgaaagcggctgcgcgaagttcgccgatatctttgagcaagtggagaccggccaggctgactatgccgtcgttcctattgaaaataccagttccggcggcatcaatgatgtttacgatcttctgcagcacaccagcttatccatcgtgggcgagctgacgttgcctatcgatcactgcgtgctggtctcaacgtccaccgatgcgcaacagattacgacggtctacagccatccgcagccgtttcagcagtgcagccagtatctgagccgctatccgcactggaacattgaatataccgacagcacctcctcagcgatggaaaaagtcgctcaggctaaatcgccgaccgttgccgccctgggcagcgaagcaggcggagcgctgcacggtttacaggtcctggaacattgtcaggcgaaccagacgcaaaacatcacccgcttcctggttctggcgcgtaaagcggtggaagtctccgatcaggtccccgcgaaaaccacgctgttgatggccaccggccagcaagccggggccctggttgaagcgctgctggtgctgcgaaaccataatctgatcatgaccaagctggaatcacgccccattcacggtaatccgtgggaagagatgttttatctggatatccaggccaacctggaatcactgccaatgcgcaaggcattaaaagagctggccgagataacgcgttcaatgaaagtgctgggctgctatgccagcgaaaacgtggtaccggtcgacccggtttaacgttcgataaacggcaatttcttcatccctgccacggcgactggcagggtgaagatcgcgccggaaagcggatatttcgccacttcgttggcatccatattctcccgcgtggtggtaatgtagagcgtcttcatatccgctccgccaaaacagaccatcgtcgggcaacgcaccggtagacgatgctcctccagctgctcgcccgtcggcgagaagcgcgcaatacgccagccgtcaaacatcgcgctccagtagcaaccttcagcatcgatggccgcgccgtctggaatcccctctcccggctgaaagcgcaggaagacctcacgtttacccgcctcgccccgctcatcgagaggtgttcgatagataacggcatttggcgtatccgaggtatacatccaacgtttgtcttcgctaaacgccagaccgttagcgccgtgaatatcacactggataacctgcggggagagatcgttatcgatgcgcactaagagcgcgccgttaaaatctcccggcccccagaaagtcccggcataaaagcggccatcgcgatcggttccaccatcattaaagcgcgctaattgcgggttgctggggttatcgcagactttgcgctgtagaagaccatgcgcatcagtgagccagataccgctgcgtaaagcgacgataaaaccgcccttctcgcgcagggcaaaacagccgggctcctcgggaaattgcagaacctgatgttcacccgtctgcacgtcgtagcgatgaatctcgcattccataatatcggcccagtacaatgcctgttcggcttcgctccaggtcggacattccggtaaatgcccggtgtaatcaaacagcggttgtggttcagccatcgttttcatccctataaaaaaagccagcgggtcacccctctggctttattgtatacgtgtttgacgacttactgccgattatcatttgcctggcgcagcaacgtccggctttcgctctggaagcgctgggcatagtcaccgaaccagtgctcaaccttacggaagctatcgatgaacgcctgtttatccccctgctccagcaggccgatagcttcaccgaagcgctggtagtatcgcttaatcagcgccagattattttccgaggacataataatgtcagcatagagctgcggatcctgggcaaacagccggccaaccatcgccagttccagacgataaataggcgacgacagcgccagaagttgctcaagacgcacattctcttcggccaggtgcaggccgtaagcgaaggtcgcaaagtggcgcaacgcctgaataaaggccatattctgatcgtgttcgacggcgctgatacgatggagccgcgcgccccagacctgaatttgctccaggaaccactgatacgcttcgggctgacggccatcgcagtacaccaccacctgcttcgccaggctgccgctgtccggcccaaacatggggtgtaaccccaataccggacctttgtgcgcggccagcatcgcctgcagcggttccgctttcaccgaggccaaatcgaccaggatgcagtccgccggcagcggtggcagctgagcaatcgttgccgccgtgatatgaatcggcacgctgacgataaccataccggcatcggcgacaatctcttccgcccgcgaccagtcgtctttttcaaggatacgaacctgatatccggaaagcgtcagcattttctcaaacagacgccccatttgcccgccgccgccaacaatcaccaccggacgcaggttcggataaagcgttttaaaacctttatcgttttcgctggaataagactcccgcatgacgcgacgcaaaacatcttcgataagatccggtgggaccccaagcgcagcagcctcctcgcgccgggacgccagcatcgccgattcacgttcaggaacgtaaatgggcaggccgtattggcttttaacctctccgacttccgctaccagctccaggcgcttagccagcagttccagcagcgccttatcgacttcatcaatttgatcgcgcaatgcggtcagttcagcaaccatatcatcctcttacgccagacgagccgccagatggcctcgcagatccttatcaagttcgcggagcagtgcatcggtggtttcccaactaatgcaggcatcggtcactgagacgccgtatttcatatcgcaacgcggctgctcagaggactggttaccttcgtggatattgctctcaatcatcagaccaataatggaacggttaccatctttaatctgcgcgaccacggattccgcaaccgcaggctgacggcggtaatctttattagaattcccatggctgcaatctaccatcagcgatggcttcagtcccgcctgagtcatctctttttcacacttcgcaacatcttccgggccgtagtttggcgctttcccgccgcgcagaatgacgtgaccgttcgggttgccctgcgtttgcagcaggcacacctgtccggcctggttgatgccgacgaaacggtgcggcatcgcggcagcgcgcattgcgttaattgccgtggcaaggctgccatcggtgccgtttttaaaccctaccggcatcgacaggccagaagccatctcacggtgagtctgggattcggtcgtacgcgcgccgatagcagaccagctaaacagatcgccgagatactgaggactgtttggatccaacgcttccgtcgccaacggtagccccatattgaccagttcaaccagcagacggcgcgcaatcttcaggccgccttccacatcaaacgaaccatccatatgcggatcgttaatcagccctttccagccaacggtggtgcggggtttttcaaaatagacgcgcatgaccagatagaggctatcgctgacctcttcggcaagggctttaaaacgacgagcgtactcaatggcggtttcaggatcgtggatcgaacacgggccacataccaccagcagacgcggatcgcggccagcgatgatgttggagatagtctggcgagactgcgcgatctgcgcctcctgctcaacgctcagagggaattcagccttcaactgatccggagtgatcaaaacctgttcgtcggtaatgtgtacgttgtttagcgcgtctttttgcatgattgcgatcctgtatagctcgtttgcgatagttattgcctcagcgaggatgacgtaacgataccacacaaagtaaagatttcaatccatattccgtaaattttactttacacatagaaattaaatcgcgctgtatttcattcaatgtgtataaaattatttacatcccatcattaaacgccagtttttccctgcttcctcgaatttcttttacgaaaaatcctagtaagaattatctcaaagcagcgaggctggctaatgacgattttcctcaacaatgctattcttcgcccgggtttcagcaatctgcatcccccacgctatgacaatctgacggaaccgtaatgactgttcttcaccgtctctttttgactttagtactatcactcgtgggtatctctgctgttgcttccggaccgtctgaaaatgttcggacaatcgtttcggggatcgtgacttatactcgctggccgcaattatccggtcctccaaggctctgtattttttcaacatcacgatatatccatagcctggccgaagacgctccggaaatattgccttataaacccgtgattgttcgtaatacacaagaagccttacagacgacctgcgatggtttttattttggcagtgaatcgccgacccaacagtctgaatttacggccaaatatggaaaccggcccctattacttattgcggaacaaaacaccgattgctctattggcagcgctttttgcctgctcatcaacaatgagagagtcagattttccgtaaatctggatgtactgacgcacagcggcgttcgggttaatcccgaggtgctgatgcttgcccggaaaacatcacatgaataaggatttttctcaggccccgcgccccacatttaaaagagcgctgcgccgtatcagcatgataagcgtggtgatctctatgacactggtctggctgttactctgcaccgcttccatatttacactcaagcaatacgcccaaaaaaacctggaacttaccgccgccaccatgggccgtagcctggaagcagcgctcgtttttggcgatagcgcagcggctgaagacacgctggccacgctgggcagacaggggcaattttctcaagcaattctggtcgatggccggcaaagacccttcgcctcatggcataacgatggtctggtcagtcaggataaaatcagcgacgtcatcagcaaatggctcttcccgaaacccacggtgcaaactatcctgcaccagggaaaaattatcggtgaactccgtctgaccgcgctggacagattgataagctattttcttggtatctctattattgtgctcaccggcagcatttttctggcttcctgcatcgccttgctccttacccactcgctgcatcgcggcattgtggctgcgttacagagcattaccgaggtggtacatgacatccgcgaaaatcgccatttctcccgccgggtgcccgaagagagcattgaagaattccacctgttcgcccaggacttcaatagcctgctgggtgaaatggaggactggcagcggcagcttcaggctaaaaacgcccagctcctgcgcagttcattacacgacccgctaaccgggctggctaacagagcggctttccggaatgtcattaatgatctgatgaaggatgaaaccgcccaaagtcattctgcgctgttatttcttgatggcgataacttcaagcttattaacgacaactggggccacgcagccggcgataaagtgttaattgaggtcgcgagccgcctgatggcctttgtcggtaaacagcatcaggcatggcgtctcggcggcgatgaatttgccgttctgttacgggatgttcattcagaaaccgaagttcgggcactgtgcagcgcgttgtccgaacagtttatcccgccgtttaatctacacaatggccacaccgccagcctgtcactgagcattggttacgctttaacctgggaacatacctcagcggaaaatctgcaagagcttgccgatcaaaatatgtatcggatgaaacaccagcgcttacagcaaacgcaaaaataaaaggaatcaccatgatcggaaaatattttgctcctgctttactggccgcactttttcttagcggttgccaggctccgcaaggaaaattctcggcagaacaaattgcagcaatgaagtcatatggctttactgaaaccaacggcgactggttattaggaatatctgataccatcctgtttgataaaaacgactatcatctgcgtgccgaaagcaaacagcaaattcgcacaatggcttcacgtctggcgagcaccggaattacccatagtcgccttgaaggtcatactgataattacggcgaagacagctacaacgaaatgctatcgcttaagagagctaacagcgtggcggatgcctgggccgaaggggcgaatattccgcgcgcaaacttgaccactcgcggactcgggaaaaagtatcctatagccagcaacgataccgcgaaagggcgcgctgaaaaccgccgcgtcacggtggttatcagcacgccttaaacacctattcgactgatttagccgctatcaccgccgttgctgagcgccagcgcagataatcaacggcgagacatagcgcgaggctgctccccatgagcggcagcgccaggcccaacaacaccgcaacaacggcagtcagcaaacgagcgggccacgctaagccaaaccacgcctgtatcaacgtattggccgggttaaacgccgcgcgcgccgggcgacggatccaccacagccggtaccccaccgctatcatcacgcagagtgcgattccgaacgcgataagcagtagctggttagcaagaccgaacaaaattcccatatggaaatcaacgccccagcgggtcagcttagccatgagcggaaagtcggaaaaatgagtgcggtccacgatttgcatcgttgcaccatcgatcgcgacagcatcaacccgggttggccagcttctgtcgatttcatttaccgtccacgcgcgcccggcacccgatggaggtcgaatctccagcttgccggcatccagccccgccgcgcgggcagccagcagaaccgggtcaaaatcctctacgcgcaactgcgccgttatctcccccattgctccatgtcccacatgatgttcggcatgcggatcgtgagcggccggagcggcgctttccagccgggtattcacctgcggcgtcagccagccaaaggcggcacgcatcctatcgacgtgactaccggcccattgcgaccaggttaaaccggtcgccgagaataacaacataccgaccagcagcacccagccgagagaaacgtgcaggcggcggttattctgcacgctgttatttatgcgacgacgcggtcgggtcatcgaccacagcgcaatcccacccagagcggcaacccacatccaggaggctgccagctcgctgtacagtcggccgaagttacccagcagcaaagagcgatgggcataatcaatccactgacgcagcggcaaaataccgctggtgccgtaaaccggcatatcgcctgtcacccgtagcgtcaccggatcgacaaaaattgcccgcgtttccgattcgccaaggttcgggtcaataaacatcactcgggtcgtatcgccagccattatccccggccgaaccgcatgcaggcggaggtttccctgaatggcctccgtcgctacggtaatttgcgcgcttagcggctgtttttccccagtcaacgtaccgtacagagcatcacgatagagccagttttccagctgaggggtggcgacatatagcgtaccggtcagggccgccacaaaaataaacggcccgataaacaatccgatatagaaatgaagacgacgcagcaggttcagccatgccgcgcgcgaggtgcaggtagtcatacttttccttttttaaagcaaaagagaacgttgcgcagtgcgcacattattttttatgtaaggaagaaagcagacggacgcggtggcgcgcgggtgtggggataaagccaggtaaagtcatgccagcgtttcctctccgggggggaaaccggggctcgctggcgtcgaagcatcaggctgagcagcagcaccagcgcgaaaatcaggcccggaacatgagctaacagtacgcagtagccacaggcttcagcatgatcgagcggcacgctgtgcgcgtgttccggcatcgaggcatcggtatgcgtcacggacatctgatgtgatggcataccttccggcatccccatcattgcgtggtgcatgccattcatcggatctttttgcagggcgatggagatcaacggcgccaccacgatcagcaggatcgcaaacagcgccagccatacggcccgccgttgtaatgctgaatgatgaaaaatattgctgaccaccgtccctccccatgaggggcgtattgtaaatgattctcaatggaatggttaaaataaagataaaaaaagggccggcccatcaggccagccctctcattcaggatgtcgcgaaagcgaatcttagttaagacgctctttgatacgagcagacttaccggtacgctcacgcaggtagtacagtttagctttacgcacagcaccacgacgtttgacagaaatgctgtcaactaccggagagtgagtctggaagacacgctcaacgccttcgccgttggaaattttgcgaacagtgaatgcagagtgcagaccgcggttacgaatagcgataaccacgccctcgaatgcctgcagacgttttttggaaccttcaacaacccatactttcacttccacggtatcacccggacggaaggaaggtacgtcctgcttcatctgttcttgttcaagttgcttaataatgttgctcataatttaatctcttatcctgggtaaactgatattgggggcttacgccatcccatcatgtttatgttgctgttgcgcgagttcctttttgaactctgccagcaaccttgcttgctcttcagtcagagccaggttttccaaaagttcaggtcttctaagccaggtacggcccagcgactgcttcagacgccagcgacgtatctcagcatggtttcccgacagcaataccggcggtacttccataccttctaacacttcaggtcgcgtatagtgcgggcaatccagcaatccttcagcaaacgaatcttcgattgctgaagcttcatgacccagcacccccggaataaaccgggaaacggagtcaatcagcgtcattgccggtagctcaccaccgctgagaacgtaatcgccaattgaccattcttcatcaatctcggtctgaattacgcgctcatctacgccttcatagcgaccgcacaccaaaatcagcttctgatttgttgccagttcgctgacgcccgcttgatcaagcttgcgtccctgaggtgaaagataaatcacctttgcgccttcacctgccgcggcttttgctgcatgaatggcatcccgtaaaggttgcaccatcattaacatccccggtccgccgccgtaaggacgatcgtccacggtatggtgccggtcatgagcgaaatcgcgaggactccagctctggatgctcagcaggccattttttactgcccggccagttaccccgtaatcggtaattgcgcggaacatttcaggaaacaggctaacgatacctataaacacaagccaatccccatagtgccgttttttaccgtttattcggagaatttaaaaaccaggatcccagtctacttcgatggtacgagtagcgagatcgactttcttgataacctgcccatcgaggaacggaaccagccgctccttgataccaaatgcatctttcaggtttgccttgatgacgagaacgtcattagacccggtttccatcatgtcgatgactttgccgaggctatagccttccgtagtcactacctggcagcccatcaggtctttccagtagtagtcaccctcttcaagcgcaggcagctgcgatgaatccacgacaatttcgcaattagtcaacagattcgctgcatcgcgatcgtcaatgcctttcagcttaatgacgatatcctgattgtggtggcgccagctttccagctcaacaacctgccactgacccgccttctggataaaccagggctgatagtcaaaaatgctttcggcgtcttcggtggaggaaaacactctgagccaaccacggataccgtaggaagaacccatcttgcccaatacaatcggttcaacaggtgcttgtgcggtgtgttgcttgctcatcatgaccaccgtgacagattaagctgctttgttagcggctttgatcagcgcagctacgcgatcggaaacagtagcgcccaggccaacccagtgagcgatacgatccagatccagacgagttccttcttcggtcgcagaagcgatcgggttgaagaaaccaacgcgctcgatgaagcgaccgttgcgtgcattacggctgtcggtaacaacaacctggtagaacggacgctttttcgcgccgtgacgtgctaaacgaatagtaaccataacatcctcttgtgtgaataaaacaccgggccccatcgaggaacggagcccggtgtcatattaaaagcccgaaaattttactgatttctggggaaattgcaatcagcagttataaactctgctgtggaagggcgactccggtacccttaaattgggtaccggagtataagtcatagccagaatgcgccaaccatgtgtcagaaaagaagcgcgccccggcagaaatggcgaccagcctatcggcctccggggaaccctggcggcatcattcctttcattccgcgcatcatcttcatcatgccgcctttcgacttcatcttcttcatcatgcgctgcatatcgtcaaactgtttgagcagacggttcacatcctgcacctgcattccgcagcctgcggcgatgcggcgcttgcgcgaacctttaataatttccggtttagcgcgctctttcagcgtcatcgagttgatgatggcttccatacgcaccagaactttatcatccatctgcgatttaacgttgtccggtatctgccccatgcccggcagcttgcccatcaggctggccataccgcccatgtttttcatctgccgcagctgttcaaggaaatcggtcaggtcaaaaccgtcgccttttttcagcttaaaggccagcttttcagcctgcgcgcggtcgaccttactttcgatatcttcgatcaacgacaggacgtcgcccatgccgagaatacgggaagcgatacgatccggatggaacggctccagcgcttcggttttctcgccaacgccgaggaacttaatcggcttgccggtgatatgacgaatcgacagcgccgcaccgccgcgggcgtcgccgtccactttggtcagcacaaccccggtcagcggcagggcttcgttaaaggctttcgccgtgttcgccgcatcctggccggtcatcgcatcgacaacaaacagggtttctactggattgagagacgcatggacctgcttaatctcatccatcatcgcttcatcaacgtgcagacgaccggcggtatccaccagcagcacgtcgtagaatttgagcttcgcttctttcagcgcggcattaacgatatcaaccggcttctgacccacgtcagacgggaagaaatcaacgctgacctgctcggccagcgtttccagctgtttgatcgccgcagggcgatagacgtcagcggaaacgacaaggactttcttcttgtgcttttcacgcaggaatttacccagcttcgcgacgctggtggttttacccgccccttgcaaaccggccatcagcaccacggctggcggctgcgccgctaaatccagcgcctggttctcttcgcccatcgcggcaaccagttcgttgcgcacgattttgacgaactcctgacccggggtcaggcttttgttgacttcatgacctaccgcgctttcttttacgcggttgatgaaatcacgtaccacaggcagagcaacgtccgcctccagcagcgccatacgcacttcgcgcagggtatctttaatattgtcttcagtaaggcgtccgcggccgctaatgttgcgcagcgtacgcgacaaacgatcggttaaattatcaaacattgtctctcgcctgaggtggaaacggtcggtcgccgcagcgacacaaaaacggaatgggcgcagtataacacgacataaacgcgaatgtgctgcaacggttggagccagagtcgcgtgacgctatactgcttctctttactatttagtcaacagtcgacacccctatgcctgtttttgctctactcgcccttgtcgcctactccatcagcctcgcgctgatcgtccctggcctgctgcaaaaaaacagcagctggcggcggatggcgattctttccgcaactattgcgttgatttgtcacgccttcgcgctggagtcacgcatttttcccggcggcgaaagcgggcaaaatctcagtctattaaacgtgggatcgctggtcagcctgatgatctgtacggtgatgaccatcgtcgcctcgcgtaatcgcggctggctattgctacccattgtctacaccttcgccttaatcaacctcgcgttcgctacctttatgccgaacgagtacatcacgcatctggaaaccacgccggggatgctggtccatatcggcctgtcgctcttctcttatgctacgctgattatcgctgcgctttacgcgctgcagctggcgtggattgactatcagctgaagaataaaaagttgaccttcagtagcgaaatgccgccgctgatgagcattgaacgtaaaatgtttcatatcacccagataggcgtggttctgttaaccctgacgctgtgtaccgggctgttttacatgcacaacctgtttagtgcggaaaacattgataaagcagtgctgtctatcgttgcgtggttcgtttatatcgtcctgctttggggccactatcatgaagggtggcgcggacgccgggtcgtctggtttaacgtgactggcgcggggctgctgacgctggcctactttggtagccgcgtattgcaacagttcatgagctaagtctttaaggaatcccaagtggaacatatctccaccaccacgctgatcgtgacgctgatcgtcatggtggtcatctccgcctatttctccggttctgaaaccggcatgatgacgctgaaccgctatcgcctgcgtcatatggccaagcagggcaatcgtcaggcaaaacgtgtcgaaaagctgctgcgcaaacctgaccgtctcattagtctggtcctcattggcaataacctcgtcaacattcttgcctcggcgctgggcaccattgtcggtatgcgcctgtacggggatgccggcgtcgccattgccaccggcgtcctgacgtttgtggtgctggtgtttgccgaagtgctgccaaaaaccattgccgcgctctatccggaaaaggtcgcctatcccagcagcctcctgctcgcgccgctgcaaattctgatgatgccgctggtgtggttgctcaacaccattacccgcattctgatgcgcatgatgggtataaaaaccgatatcgtcgtgagcggggccttaagcaaagatgaactgcgtactatcgttaatgaatcacgctcgcaaatctcccgccgcaatcaggacatgctgctctccgttctggacctcgagaaagtcagcgttgacgacatcatggtcccgcgcaacgatattgtcggtatcaatattaacgatgactggaaatccattgtccgccagctgacccactctccgcacggacgcattgtgctgtaccgcgacacgctggacgatgccatcagcatgctgcgggttcgcgaagcttatcgcctgatgacggagaaaaaagagttcacgaaagaagtcatgctgcgcgccgccgatgaaatttacttcgtgccggaaggtacgccgctcagtacgcaactggtgaaattccagcgcaataagaagaaagtgggcctggttgttgatgaatatggagatattcagggtctggtcacggttgaggatatcctcgaagagatcgttggcgattttacgacttcaatgtcgcctacgcttgctgaagaggtgacgccgcttaacgacggttcagtgattatcgacggtaccgccaacgtacgtgaaatcaacaaggcttttaactggcatctgccggaagatgaagcgcgaaccattaacggtattatcctggaagcacttgaagagatccccgccccgggcacccgcgtacgcatcgaacagtatgatatcgatattcttgatgttcaggagaatatgattaaacgggtgaaagtgatgccggtaaaacccattcgcgaaagcgtggccgagtcatagcaaccctgggacctggctgaggggaatagaaaaacggctacctcgcggtagccgtttcgcttatttacttcgctttcgccacggtgaccatcgccgcgcgaatagtacgtccgttcagggtataacccttttgcatgacgcccagaacgttacctgccgcaacgtcttcagactcaaccatcgcaatggcctgatgtacgttcggatccagcggcacgttagtatcgccaatcacttccacgccgaacttgcgcaccacgtcgagcatggacttcagcgtcagttcgataccttcaaccatcggcgccatatccgggttagctttatcagcgacttccagcgcgcgatccaggctgtcgatgaccggcagcagctcgttaacgaacttctccagcgcaaacttatgcgctttttcgatatccagctcggtgcggcggcgcaggttatcttcatcggctttcgcacgcagcaatacttcacgttcgcgcttctgcgcttcagcaagctgagcttccagattcgcaattttttcatcgcgcggatccacctgctcagccgaaacctcaggctctaccgcctcaacgtcgtcgtgctgctccgtgataatttcttccggggcttgcccctcaggcgttttctgttctttactactcatgaatttctccgcgttttttttcgcattcatctcgctaacttcgcttattatggggatcagtttcctggtttcaagggaacgcagccagattgtcactattcatttaacgcaaggacatccagatcatgaagaaccacttcaagtgtataggcattgtgggacaccctcgtcacccaaccgcgctgaccacacatgaaatgctctggcgctggctgtccggcaaaggttatgaagtgctggttgagcagcaaattgctcatgaactgcagctcagcaatgtgaagaccgggacgctggcggaaatcggccagcaggcagacctggccgtcgtggtgggcggtgatggcaatatgctcggcgcagcgcggacgctggcccgctacgacattaacgttattgggattaaccgcggtaacctcggttttctgaccgacctcgacccggataacgcgctacagcagctcgccgatgtcctcgaaggccactatatcgccgaaaaacgcttcctgctggaagcgcaggtatgtcagcaggattgccagaagcgcatcagcacggcgattaacgaagtcgtcctgcaccccggcaaagtggcgcatatgatcgagtttgaagtctacattgatgaggtgtttgctttctctcagcgctccgatggcctgattatctccacgccaaccggctccacggcttattccctctccgccggcgggccgatccttacaccttcgctggatgcgatcaccctggtccccatgttcccgcatacgctgtcggcacgcccgctggtgatcaacggtgacagcacgattcgcctgcgcttttctcaacgctgtagcgacctcgagattagctgcgatagccagatagcgttgccgattcaggatggtgaagatgtgctgatccgccgctgtgactatcacctcaatctcattcatccaaaagattacagctatttcaatacattaagcaccaagcttggctggtcgaaaaaattgttctgattttatagccagcccctttactggataaaaaaccatactatactgtacgaaaacacagtaatggtttttcatacaggaaggcagctatgttggcacaactcactatcagtcattttgctatcgttcgtgagctggaaatcgattttcacagcgggatgaccgccattaccggcgagaccggcgccggtaaatcgatcgctatcgacgcgctggggctgtgcctcggtggtcgggcggaagccgacatggtgcgcagaggcgccagccgggctgatttgtgcgcccgcttctccctgaaggacacgcctgccgcgcagcgctggctggaacagaaccagcttgaaagcgggcgtgagtgtttacttcgtcgcgtcatcagcgcagacggccgttctcgcgggtttattaacggtacggcagtccctttatcccagctacgtgagctgggtcagctgctaatccagatccacggccaacatgcccaccagctactgactaaacccgaacaccagaaaacgctgcttgatggctataccggtgagtatgcgcttactcagcttatggcagagcgctatcgtcagtggcataaaagctgtcgcgatctggcacagcatcagcagcaaagccaggagcgcgcagcgcgtgcggacctgctgcaatatcaattaaaagagctaaatgagttcaacccgctgccgggcgaatttgagcaaattgatgaagagtacaaacgccttgctaacagcggtcagctgctgaccacctgccagcatgcgctgacggtgctggcagacggcgaagaatccaacctgcaaagccaactctacgtcgcgaagcagctggtcagcgagctggttggtatggacagtaagctctccggggtactcgatatgctcgaagaagcgtctattcagcttagcgaagccacggacgaactgcgccattatcatgaccgcctcgatctcgatccgaaccgcctgtttgagctggaacagcgtatctcccggcaaattgccctcgcgcggaagcatcaaattacgcctgaagagcttcctgacctttaccagtcactgctggaagaacagcgtatgctggatgatagcgcgggttctctggaatcactcagccagagggttgtggagcatcatcagctggcgctggatacggcgaagcagctgcatgccttacgccaaaatagcgccgatgagctgactcagctcattacggagagtatgcactcactttcgatgccgcatggggtgttctccattgatgtcgcgttcgatgagcgccatcttacggccgagggcgcagaccatatcgaattccgcgtcaccactaacccgggtcaaccgctgcagccgattgctaaagttgcctccggcggcgagctgtctcgtattgcgctggcgattcaggtcatcaccgcgcgtaagatggaaactccagcgctgattttcgatgaagtggacgtcggcatcagcggccctacggcggcggtcgtcggtaagctgctgcgtcaattgggtgaatcaacccaggtgatgtgcgttacccatttaccgcaggttgccggttgcggacatcaccatttcttcgtatgcaaggaaaccgacggtgaaatgaccgagacgcatatgcaccctcttgataaacgcgctcgtttgcaggaactggcccgactgctgggcggtagtgaagtcactcgtaacaccctggcaaacgcgaaagagttgctcgccgcgtaaactttttgattttcacagagtcatagtgaacagcaaattgccgacagacctgcagccgaaggttcccaaccgggcaaaggtctattatcatcggcatattacagatgagccacgtactgctcgggcccaaaaaggaatcaaatcactatgcgctgtaaaatgctgactgctgccgcagcggttcttcttatgttgaccgcaggctgttccactctggaacgagtggtttaccgtcctgacatcaaccagggtaactatctggcaccaaccgatgtagcaaaaatccgcgtcggcatgacgcaacaacaggttgcctatgctcttggtaccccgatgatgtcggatccgtttggcaccaatacctggttctacgttttccgtcagcagcctgggcatgagaaagttacccagcagacgcttaccctgaccttcaacagcagcggtgtgctgaccaacattgataacaaacctgccctgacggcggagtaaatctatcaatacgcaaaaagcgctcaatgagcgctttttttatatctgcatcttcgtgcgaaacggttactttccggcgcttttctctgcccgctggcgacgcagctcttttgggtcagcaatcagcggccgatagatttctacccgatcgccatcgtggacccgatcgtgaagcttagccgggcggctataaatccccactttgttcttcgccagatcgatatcatcacgcagcgccagaaggccgctggccacgatcgcctgctcgaccgtcgcgccctcctccagcttaacgctttgcagatactgcttttccggcaatgcgtaggccacctcaaccacgattttagccgacactgtagacctctttagcgcgggtcgtgaacgcctgcaccatattcatggccagctctttgaaaatgcgaccaaaggccatttcaatcagcttattagtgaattcaaaatcgagatgaaactcaattttgcacgcttccgggcttaagggaataaacttccagccgccaatcagctttttgaacggaccatcgaccagactcatcagaatactttggttactggtcagcgtatttcgcgttgtgaaggtcttactgatacccgctttggagacgtcaaccgccgcggtcatttgcgtcggaccgagctccagaacccggctaccggtgcagcccggcagaaaatcagggtaggacttcacatcatttaccagttggtacatctgttccgcactgaacggcaccagggcggtacggctaatctgaggcatagcaggttccacatataaacacggtgtaaataatatcatttatctgctgctaaaaaaaacgctgtaccgcaactcgtgctaagatagcccattacgcctcgcgggaagattgaggtacgactgttttaagacgatgacttcaggatactatgactaagaaaaaagcccacaaacctggatcagccaccattgcgctgaataaacgcgctcgtcatgaatactttatcgaagatgaatacgaggctggtcttgccctgcagggatgggaagtaaaatctctccgcgcaggtaaagccaacattggcgatagctatgtcattttaaaagatggcgaagcctatctgtttggcgccaactttacgccaatggccgttgcttccactcattacgtttgcgacccgacgcgtacccgtaagcttctgctcaaccagcgcgaactggataccctgtacgggcgcatcaaccgcgaaggttacaccgtggttgctctttcgctgtactggaagaatgcctggtgcaaagtcaaaatcggcgtagcaaaaggtaaaaaacagcacgacaagcgtaccgatatcaaagaccgtgagtgggcggtagataaagcccgaattatgaaacacgccggtcgttaattccccttcctgtcagggtcagttttgctggccctgatgctatatcgttgttgatgctgatttttcacccaatctgacgccataatcctcaaaacgaggactggtaagcacattcataaatctgttatactcaccgtacacattggggctgattctggattcgacgggatttgcgaaacccaaggtgcatgccgaggggcggttggcctcgtaaaaagccgcaaaaaaatagtcgcaaacgacgaaaactacgctttagcagcttaataacctgctctgagccctctctccctagcttccgctcttaagacggggatcaaagagaggtcaaacccaaaagagatcgcgtggaagccctgcctggggttgaagcgttaaaactaatcaggctagtctggtagtggcgtgtccgtccgcaggtgccaggcgaatgtaaagacagactaagcatgtagtaccgaggatgtaggaatttcggacgcgggttcaactcccgccagctccaccaaaattctccatcggtgattaccagagtcatccgatgaagtcctaagagcccgcacggcgcaagccctgcgggcttttttgtgccttgaatttgtcccgcgaagtctgatgccaactaattaaatccgaaccttttaggcaccttgttaggcacctcgtaaagctttattgttttcgaggtgcctaaaactatggaaacccggcaatggcaagacaaaccaaacctctatccgttaaggaaatcgaatctgctaaacccaaagaagcggactacgttctctatgatggcgatggccttgagctactcatcaaatccagcgggagtaaaatctggcagtttcgctacattcgtcctgtcaccaagaaacgagcaaagaagagcataggtccctacccgtcagttacccttgccgatgccagaaactatcgagcagagtcacgctctctcctggcgaaacaaatcgacccacaggaacatcagcaagaacaacttcgcagttcgctggaagccaaaactaatactttccagctcgtggctgaacgttggtggaatgtgaagaaagccagtgtgaccgaagactacgcagaggatatttggcgctctcttgagagagatgtttttcctgcgattggcgacgttagcgttacagatattaaagctcacacactggttcagaccgtccaaccggttcaggccagaggagcactggaaaccgttcgtcgcctgtgccagcgcattaatgaggtcatgatctatgcccaaaacacagggcttattgatgctgttcccagcgttaatatcggtaaagcctttgagaagccgcagaagaagaacatgccaagcattcgaccggatcagctacctcaattgatgcagacgatgcgtacggccagcattagcctttcaacacgatgcctgttcatgtggcaacttcttaccatcacccgccctgccgaagcggctgaagctcgttgggaagaggtagacatggaagcgcgagagtggaagattcctgcagcacgcatgaaaatgaaccgcgaccatactgttccattgtcagatgaagcaattgcgatactggagatgatgaagccgttaagtggtaatcgagaatttatcttttccagtcgcattaagcctacccagccgatgaacagccagacagtgaatgctgcactcaagcgtgctggcttaggaggcatactcgtatcacacggtttacgttctatcgctagtacggcactcaatgaggaaggattactgcctgatgtcattgaagcagcactggctcatgtagacaaaaatgaggtacgtcgcgcttataaccgcagtgattaccttgagcaacggcgatcgatgatgcaatggtgggctgattttgttatggctgctgatcgcggaagtatgattgagggaggtatgaggggagagcgtttagcgggatgacggataattaatgacagttcccactttagtagtgggccagatgagaatttatatttcaagcgaaagctaatagttttagaaatcaagctaattagcataatatctcttaattgaagggatatggagccgcagaaataaatgaagacacggcagtatgcgcaaaaatcaatcttcgatctggaagcaatcttcgagcagtccagcaacaatgttagcgaacttgaacagttgttgagcgagctgacctttcgcaacactgccagggcgcggacgctgacggctaaaatcgagcaatctctatttgcacttagcggccacagcgtggtcgccatgtcggcttccagcccatcaacacgccatcccgattcggtgtccattcaatcttctcgagttgtgccccacaattcgcctgctgcggaagagcaactgcaactgaaggccatcccagactctgccatacgagagcaattcgacaaagaccaaatcgaccttggtccgatcccgtctttttctccatcaggtaaggcgaatgatgcgcgagcaatactggcagcatggacagccctcgaagcactgtcgcctcaaggttataaacgcccagaggatatggcaaccggcgaccgctctagggttgctctattggagcgaggtgttccatggggaccaaatgcccgcagcaagcccagttataagctttatttcgaggtcatcctcggctccatcgctctcgacaaggcgacggacgagctggtcaaggtttttggcgaggatgaggagcgttcacgcccggacggtaagaaagcggccatcggctcgatcctgatcgacaaagaaggctttgtgcttgagaacaaaggcgttgccgtgtccagttttgcctgggcactcaagccggctctcgatctgaagcttgggagtttagggaattggccgaatgttgagccgcgcattatcgagcatctggatcgaatggttcgccaccacaacaaagatggagaacccataccgatcgatctgaatgttgttcataatgcttataaatggcttgtatcgcagttcagtgtacccgagcatttggttgagccccccacattcgcgattaaggtgtttcatcatttcaaggctaaggcgccgcctgaaccttcgttactgaattccttctatcttgaagatctcggtgaagcaaccaaattgctcgagacgggcaaagccggaaccggtttgcgccgctacatgggaattggcagacctgaccagaaaattgacgtgctatcgcccatttccgcagttgagccgctcgtcgcaccgtcgctcatgccgcaggctcgttggccttcgaaaggcggccatccactggtgctgcttcaacaggctgctgtgaatgcggcgcgtgctgagctgaatgatgctccaggtatcatcggcgtcaatgggcctccgggaaccggaaagaccactcttctccgggatatcgtcgttggatgcattctcgatcgggccacggcgatgtccggcttcaacaaaccgcaggatgccttttccacaacaggcgagaagctggcattcggttccaatgcattcctgcacttctacaagttacatgcatccttgaagggccatgagatcgtcgtagcctcctccaataacaaagcagtcgaaaacgtcagtaaagagcttcctctcaaggaagccaatggtcgccatgaacagatcgcctacttccggtccatcagcgacctgattgcgaatcccaaacgcgccggctatttcgaagccgaggccgaggggggcatcccctccgacactgtcgaaacctgggggttgatcgccgcagctctcggcaagagcagcaaccgcggcgcgtttcagcaaggtttctggtggaatgaagacggtggtttccttacctacctgaaagcagctcgcggcataaatgtcatgcgtgagatcaaggacgagcgaactggcgaaaccatcgatcgcgtgatgcccagcgtggttgtcaatgagcggcccagcaccaacgaagcggatgctgctgcggcctggcagaaagcgcgaaccgcctttcttaaacttaaggagacgatagacgccgaaatcgccagcatcgaagagatgcgacgggatatccaggcgctcaagggagcgatcaccgaacttcaaagggctgaacagcgtcgaccgagtctgaatgaagccgtcgaagaagcacacaagactgctgaatcctgccaacgagagcatgagaaggcaaaatcgcagatcgagcaggacaagatcatgctcgacagccatcttgcttgccgtccaggtttcttctcccgtttgtttgcgactgcggcctggaagtcgtggagatcgacactgcagaagctctcggcgaccttgcagcaatcagtcatacgggcgcaggggacggacggtgccctagagcttgcaagggctgagtggagcaatactgagtcccagttacagcaactcgaccaggaaatttccagcaaatgtcaggctgtctcgaaattgaaggcaaccgaggcacaggcacgaaaccgtatgggagacagggtcgttgatgagaggttcttcgagcgcgagcacgagtctatccacctcactgcaccatggcttcccgatgaggttcatcgcctgcgggaggatcttttcgccgctgccctgactgtgcataaaacgttcatcgatgcttcggccagccgcttgcaacacaatcttgggttattgatgtcaggcatggtagctggtgccttccagtcttccgctcaccgtgaacttctccccgacctttggtcaagccttttcgtggttgtgccgaccgtgtccacgacattcgcctctgttcggacgatgttcggggatctgccaccagagagcattggttggcttctggtagatgaagcgggccaagccgttcctcaggcagcagttggagctatcatgcgggcaaagcgctccatcgtggtaggtgacccgttgcaaatcccacctgtagtttcacttcctgaaaagctgaacgccgaaatctgcaagttctttgacattgaccaagtcgaatggtctgcccccgcagcatctacgcagacccttgctgatcaggcatcgcgcttcaaatccactttcgtcatggacgtaggtgatcgagaagtcgggctgccattgctcgttcacaggcgttgccagaacccaatgtttgatgtttctaactccatcgcctatgccgggcagatggtccatgctgtcgggcctaaaaaacccggatctatcggctcggctttggggagatctcactgggtggatatcaatggcgatgctgagacgaagtggtgtcccgacgagggcgaagcggttgtgcgaatgctcaaagagctggcagcatcgggcattacaaatccggacgtatttatcatcacaccattcaagatcatagagcagaacatgcgtcggcgtctcgacagtgaaactgatctgcttcgaacgttcggcgtaaagctggatgaatggtgccgtgatcgtgtaggcacaatccacacgttccagggtcgagaggcggacacggtaatcctgttgctgggtgcgccgaaagcgagtcagcaaagggcacgtcagtgggcggcaagcccaccaaacataatcaatgtagccgtctcacgcgccaagcaaaacctgtatgtggtcggctcggctgctgcatggacaggggcgggaactagccttcaggtcctgcatcggcaattggcgaaatcagcctaacaatctccgaggtggccctcattattgagggctcatcgcgactcattcttggctaacttcagtaatgggctggccgctatgtgttaaaatctgacattgctcacataatagtcaagcagtcacttttcaccgcccatccaagcttgataattcttaccgctccccttatatccacactgaggaataacctctgacatggctaaggagtatgattatggggcttaaacctggtccaaaaccaatcgcaaaatcaacaggaaaacccgatcaacgcagacgtgataataaggatacacccggcaataccccaggactgaaaccaagcaaatcaactgggaagtaatcgttcaagggtatggagaattcatctatacccttatctcatcaaatcagtctgctttagcccgtttagtgccaggagcggacgttggcttgaagcgtctcttttctgtgatgctcgccaagagtagcggatctataaaaaaacactctatccggtataatctctttcatgttttcttttcggtatctaacaccatgagcatgtcagcattacaaccgcagatagttaaagcaatgaaaccaaaacatggaaaggattggatgttagtccgtggagacacggttttcgtccgctttttagctcaaaatgatgatggtaattcttttgaagtgcagacaccaacgaggcccgaagagagaattcgcactgggggtggtttgactgtcggatacaagctgccagtaaaccagaagctccttttttcggtcgctgagacgttagcccaagaaaatcatcttcaacctgagaaaaaagtagaccgctttcagaataattgcatctccatgttttccattactatagatcaaggcaaaactatacaagatgaagtcaacgaggaatgggtcactcgcttctttgaactctacgatgctcatggaatttcgacgaatattgtcgaacctagcatggtcgatatttattctgacctatgtgttgaggatggcgaagacgtttatctgagtgatggtatgtacatgcgcccagacgggacaacttacgaacgttgataatgtaggtgcgaaagcataaatcaattcccggttgatagctgggatatcacttaaccatatccgataattagtccaagtagcccaacatttcaggcgactgctcgtattcatgaccactctatgagttagttcgccgccacgctctggacttatttctctgctttcagacgatctactatctccttctctcttcataaatagacaaaagtccgctcctcgctctcagcagacctttatcggcaggtacttgtctgctgtgtgccagaagcagatattattatataattctttaaccaatggatgagaaaaaattctggaacttattaaaacttcataactttaaatcacctcattcattaatgaatgattaactgtatggttaaaagatcaaaacttattttttattattaacttgttttgctaaagagctataaaccaaatcaacgaaaacatatttttcgcattcccaaggttcactaattgatgggtttactaaatcgggcttcccccccattagactatgtatgtgcgaataaataccaattctttctgcgagttgcattagtttcatttgatgttctggtgggagcatcttatttctaaaccatgttgtaaatatatgcttagtaagttctttagtacatataaaccattcgccttgacgtctttcgttgctaaatttttcatgtagataattttctttttctgatccgccaggttccaaagcgtgtaatattaattgaccaaatgtacctgtttgtaagttagataatctttttagcacattattggaacgtcctattttcacataaagccccgaataaggattatttttatctgaagaaccggcccaagtatcaggtacttgtaaaatataataaatactacttacttttccactcgatacactatttgcccaagtttgccactcttccatccagctatttgcatcttccttcgtgtcaaaagtgtgacttgtatagtataattcaccactatccaataacatatcgaaaacatattccccactctcaatcattcttaagttgtcggttctcatggaagtatctcataaatttacagggatatataaaatggactttactacacttattaagtgatatccatttttattgttccaattgcagtgttctcatccattatgttaccacctgattatttcattatttaatttaaacaacttattgctagtgataacggtttgatgcccgcttctcactccaatctaactttcagaataaatttgatctaaaatatttcaaataggccgtcagtaaatatggaccatttttaatcagttaggggatcaatctgattttctctaataagatttcgcaacgcagtacgagcagcagcgatttctgtcatcccattaagaaccacgctggactgtcctcctctcaccccaaagactgtaaccatattctcttcacagaaatactcaccttcatactgcaggccatctttctctactcgaatgtatgacataacaacctcatttaaggatcttttgtttgaatcatatccccacaaaataatttaatcaatctcacccaaaactacacgcgatgcttgtcttgtaagcactgcacttaaccgaaccattcgattttagagatcctgcgtacagttcagttatgcttgtaaggctaatgtccactcctcgctcaaagcagaccttatgacctcgatttctggcagatccgagccaagagcaaaaattgatatcatcaatcggcctcaagcttaaggggaacatctccccctttttgtgtaacctgtttactgaagatgttctttcagccaggtacacgcgccttcaatgtcatacgctttttccccaaatcctttcgcaagcagaaactctggtaaatattcatcatatttatctaagtacttttctggaacatttacagcaagatcaaacgctgagggcaagtctgacaacagcaggcctttaagggcctgttgaacagaagtgatacttgagccgtcaatttctataactccagccaatgaattagctttaaagccacaacgtatgagcaaggctgtaatcgtattgacaaccttatctcccatccatgggagtatgtaacagtattggccgctcgtaagaaaatactcattttgcaggttataactctggaagttacgactgccttccgcaaataggcttctggcggcagaatcggcataatctactctctcgctacctattgctatgcggtaatcaccttccctatagatagcgagcatttcctgacgaacggcatcatgaacagacattccccctccactaaattgtggtggctgaccgcctttggtcgcctctacatagataacttttttctctgtctcgatctctgtcactctccagcgccgcccaccgaagatgatgtgttgatctggtagcagtggggagtccacaggcactgttccaagggttctgtttccggtgacaatgcggaactcttctggtgtgttgaacacggcataaaacgtgtaatggttagtcagtttctccccctctgccccaacaaccatttctccactagcgagttgagtgagcaggccacatgcccccatatgtttaagcaggcttttgaaatcgcctatatccacattacggaacgggcctgtttgacatagctgtgaccagagttgatcggcacgaactccgccccattgcgcggtaattgcaagaatctggtgtagcagcgtggagtaatgcatctgctgggaatcggcaggctcaaaccattgtttagagatcatcaatctgatcattgccatcgactggaccaaatgcagccgtaggtggtcaacgatactgctagtcacagtgagttcattttctgtaattagcattcttagaactgatgggcagtcgcgccgcccagaacgtcccatacgctgacgcagactggaaacagtatgcggaggcgtaacttggataaccgacttaaccttaccgatatcaattcccaactcaagcgtcattgtacaaacagctgttgtgggcaaatttcctttctgaagacgagtttcaagcgcttcccgcaattccttggcaagggaaccatggtggggaaagaattcattgggaacaatatgttcctcacacatgtcgctcagcgtggcagcaatgctttcagtccgctttcgactgtttgcaaagaccaaatgagaatcgccacggcaaagtctaaaaatgtcagcgcaaacgtcatgttcagctgaactctgaagttcttcttctttttggagcactcgctccagataacctttgacctgtacctgaagagtggcctcgctcttactatctgtaacagttacgcagggtagtcgtttgtccgggcgcaaaagttcgggcactttctccagttcccccagcgtggcactcaacgcaacgcggggaattggatttatctggcgtcctagcacatggtcaattctattgagcagagaaagcagctgtacaccacgctctgagccaatgaaagcatgaaactcatcaataacgatgtatgcgactgacgaaaacgcctgtttgagccagcccattgaatttatgagcaaagactcaagtgactcaggtgtaatcagtaaaatgccagcagggtttgtccgagccttcttctttttgctttgtggtacatccccgtgccaaggagtcactggcatttccaatgcatctccaaggctctcaagacgacggtactgatcgttaatcaatgccttcaacggactgatatagacgatgccaaatccattagtgagatctgcaactgccgaacaggcaggaagaaagaaagcctctgttttacccgctgctgtgcctgcactgattagcacgtctcgatcacgggctaaaattgccgggatagaactctcctgcaagggccttaatgttgaccacccctgcttgtaaatccacttacggacgcggggatcgagactatcataggcactgctcataatttgaagttcgccagtccgtcatcgtcatcgctttcctctataatggcgtcatccatttcgctgggcctgtcctcttcaatcgccacaccctcgattagtgtttgccagttcatcgttctgttttgttccagcacagccagcatgtccaggaaaccttttatggtattacggggggtacggaagtaagcgtctccaatggttttactacagtgatgcagaaatccagtcagtgcctcatctggaaccagataattctctggatctccgcctgcataaacatgacgaagatttctcagtaaaatatacagttcctcaggggtgaggctggcaagatgcaaagtgggagacgagtagtcaatcactcctgctttttgcgcgaaccgattttccgccagacgtgattggagcgcctcatagctgtaaagacctttgcgcggatcgaaaaggaactctggcgtccccccgaggataaaaccaatattctcggctgagccttgcaggcagtcattcaggatccgcaaaatctgttcgtagttcgctgttcttgcttgcgtattattcagtttaaagaggttcaccatttcgtcgaggctgaccaaaagaccggcatagcctgcctggcggacaaaaaggctcatcagctttaaagagtcatagaatgaagcgtctgagataatagtccgaacgtcgagatcgttacgggcatcagttttagtggtgtactctccccgcaaccagcgaatagcattggattttagtgtttcgttatcctgctcatgcccgcgccagaatgaatcaatgaccttcgcaaagtcatatccgccgaccatatctgatagtgctgccaggcgtttatgaataactgatgaaacctcggagccgtccttgtcagcttccttccttgcctccgtaacgaatctttcaacaacgctaagtaacgcattaccatccggcttgtttctggtggacatgtttttcataagctcagaatagagattacgagcctgacctcccgatgagtgaatgcgtctgtcaggagaaaggtctgcactgattgacaccagcttcttctctagcgcaatagagcgcacaacactcagaaagaacgttttaccagaaccatattcaccgatgataagtctgaagcttgcaccaccgtcagcaatcctctcaatatcctggtggagagcggtgatctcattcacgcggccaacctggatatgctgaatgcctatccttggcgttacacctgacttaagtgactgaataatagcgtcgcgttctttcactcttatacgtgttacagacattcactatccctctaattctttggcaatttccaggtcaacccagatatcatcatcggcatcgtccagtaccggagcatcaaccaccgcataggaccagtcattaatcacctcaagcgcaccgccgagcatcaaattcaaatttccgcacaattctgtcgcctctttccgggaccactgttctttctccagcaaactgcgataaagctggctatgtgcggagtctagcccccccgcctccgttaatgaggctggagcgctttctggctcttccggttcttcttcggtgaaaattgtgttcagcaatttacgaacatcatccgtggcagattcgtggcgggcaagtacattagcatccagtgtgaaccctactgctggctgatcagttggtacagacgagacgagatcatgttcagttgcggaatgctgatggatattgctcgagacagatgagggatccagccccaaaattgaataaatcttctcaagctgtttgatttcggcaggcgctattgtcctatccgaacaggcaacactaacgataactttacccacagcagctttttccgcggcccccatcaactcaatcctgcttttcattcctgtcatattggctggggtatgaagttgccacgttaaatacgcatgtagagagcatttttcatcatcggtgaagccagtattgttgttgatggcattctcaagcactttctgttcagcttgatcaagagaatcgtcaatcaaggcgaccatcgcccctaatctgagcgtcattactgctgagataaattcagaagaaggtgagaagcgcccaccttcggcggcagggaatagaacaagtgtcccatcaacatccgccttcacatggtgataatacgggtcaggtgccagaccgtaacccatcttcagagcaaaggcctgcatcaaatcggcctcttttttattgattttattggggcaactggcattcatatgtgcccaaaaatcagcaactgagactaacccctccttgacgaggatcgcctcatcagcccagcgtttgaatgagcttaatattttttctgcgctttcattaacgatctctgaagggagcaacataattgcagccgtatcattgactgacgtacctttcctacctaggtagcgactataagcatcaagttcatccgtacatatgtcggcaagagccataattttctggacagggctcttcaacgcacttggatcaggcaggtcgggaacagggagtcgaacacctcgcaaactaggacttgctggtgtgtaatctaaccttaggcgcgttttattcgccttaacgaccatcccttcaccatatttgagggtgtaacgccgtttgaaaagcgcagcaaactctttagcacagcggcgagccggggtacgcagcgaatactcggtgtggtttattacccagttcaacgccagttcagctgatacaggaactccttcatgtacagtttttgccagagccagcttaaattgcatgctgttgctgaaacctgaattgctatcgagctcagtggctaagcccatgttcgggcgcagaatagacatggcttcgagtaactgggccgaatatccacggaatgagcggttctcaatgaatacggatcttaaccgagctacttcattgaacagattacggaactcagcatcagggaattttgggtcagtggaatctatgagcgcttttctttccaggccgtagaggtagataaaaacatagccgataggacacgatggatcagacctatcgctggcgagccaactgacatacgcaccgcgtgcttctggggaaagagaggaaaaactgggccagtatcctaatgaactgtcctcgtaaagataagaagtaggttttatcttacatgtgtcatcaattaatgatgcctcatttccatcgtcataatagccgcctgattccagaccggagggcttcatacgttgccccaagtaaatgtggccaccgctaattgctacaccagctacagttatcatctcacccggaagtatccatcgagctagtgcgcctgctgactttgaggtgttccggtaatgattggttgccacccgaagttcaacaccccggccaccgctcaatgtaaaagttgcaaggttatcgtcttcactatcatcgtttcgcacaaccgcctcttttttcttgatgtcagcgagccattcttttggcggtgctttcacggggcttgaagcataagactttggagatttacgttttttctttctaaaaaacaacaagtaaattactaaaatcgccgccagaaacttcaataactccatgatatataaccttaaaatcatcctccattcacatttgaaatgtggtagggaatgcatggcaagtggattaatctcaaaataatacgtctaaatcgctatggttaaaagcaaatcgcaattaaaattaactaattgatttaaatgacaaaaatcattgaataatttacttcaccagaagtgaatttttaaggagtaaaaaacctgctgggccattcgcctaagaatgatgttgtactaatgctaggttaacatacgagcaaatatactgaggatgcagaactgtccactgtacgatgacatttacctattcgttgagaatgtcggtaactattggaaagccgttagagactgtacattctcggattttaagagtagctggttaagttttgtgtaatagctgcgtcaggtcaaacctgatctatgagcagatatagcgaggggccccacgctgatttttatcaactaattaagctatgagctgagttgtgccgaagttaagatatcctcatcgcctacgttgatgagctgaagagcatctctgacgccattaatgcagtttatccggagagcggattaagttctgtatcattcacatggtgcgtaatagcctgcggctcgtatcttagaaggactacaaagcattaacccatgacctggggtacctgcggcagaggcggttttacacgacgaataccattgccagattggacagtgtgatccggcataccattaaaaagtgcaaagtactcccgacagattactcattaaaagttgtatcgctatcaaccctgtcagtatcgctaaaaagacgatgatgttcaggggagctcgtatcgtcttattatcagctctatgctcttctgcacagccacatctgagaaaaggcagtcgcattgaatcacgtacgcgctctcaaggtaccggactatcgattttgcgacaccccgatacgtttttgtactgccttcgcgaacgccgccttcactcttttgtctttgactgaccattcagccaacaacttgctctggcttgcctccaccattgccgcgtcccgtgagtcgtttttatcctgtgcggaaggccatccatgctcctcaatatagggccttaacgctttaataattgcgttgatggtatcggttttagtttcccagccctcaggttgcgcttccaggtgttttatcacttcgtctttaatctttaaatgtgtgtgttgcattatgcactcatatctaccgtagtttttttgcgcatacgtgctaaatggggatcgtttatagaattatgctacgcctatttcttaagcagcatgacagacagatttaagcgaagagtagatcaatctatccgaaataatagctactatcagattgtaagtaacaacatcttattagtaacgatgaatgaataaaatacctcacctattttttataaaaaaagtcgcatactcctcctgcgtttgattcaatagtctcaacctaaactatccatagaaatgtgtaattgagaaatcatgacagaagactccaaacgcggtagcgcattaatctgcgctttaaaatctgacgaggtagtcgagctgagcaaggaatacgctgagcttagcattgacgctttgattgaatcaaaaacgcttgaatctatcccttttgttagcactgtggttggagtatacaaagttgccagttctgtcaggagtcagctatttactgaaaagatttttcgtttcctcactcacttctcagacctacccgatgctgaacggattaaaatgactgaaaggttgaatgaaaacgataagtttgctggccaggcaggtgcaagactgattgaaatcatcgaccggatggaaagcgaaagcaagcctgaagttgcggcagaatttctcaagtcattcgcacgagaagagatagattttaatgttcttcggcgtttgctcgttgctcttgaacgtattccctcatttgatatcagtgaactggcggcttttgttgccatcgaccctgaccaaccagtggaaatggatgaggcctttttagatagtctagttaatgctgggttgggaaagaacaatggggcatggaaaagtgtaattgttcctacggagttatgcataacttttgtgcgcgcaggaaggttataagcaacctagctttttattatcccagaaacggattgtcttactagtctgtgtgctagttgtcgcagcataataacagaaagtccgcttctggcactaagcgaacaagcttacgaagcctaaggttcgatatgaacgagaagcgaaagtcagttgtatcatcgtctcctgtattcataggtacacctcgctttattttgctattaattgataaatagtgatattacatttaatggatgcaacctaagtacacttccccaaaggtttttaatgccaactgactaaattcagttgttaagtttttcgacaaaaccaaccctttgttaatagttttaaatgtggcaaactcaggcatctcatccccgagaggttcattttccctgagcatagactgtcgaagcgtagcaaaaagctcaaatccaagaggggcttctattgggggctcatagccgcagtcgtaaccgtaagttaagatttttgcttttccagttattgtttctctaaacctaacaccactaaaagatgccaccaaatcagcaagttgtatcccacaaacttcatgagatgagcatgttataacttttacttcatcagaacatagactgagagcttctgtagagtttatgataccttcatcgaaaaaaacattccctttcccatctggaaagttcttaatcaataagcttaataaaaatgacacatccgaataacaacaatggcgatactcacttggcataataaatgatccccatcgacaatttgagttcaagtaagaaataagtttacacctcaaatctcttaaagattcagattgatccattcttgcgcatgagtgatgttcatcaactgaatgctctgaaagaattttgtttatatcagactgaggatcttgatcacaaactacataagccatgatcataaacccaaactcctcgtgtaccgactcatcaatgtaaatgttcaaagccttatcctttcaatgatatatgattttttatgttagattataggtagagttcattgaattacaacgctatttttgaattagtaatcctctaaatatattaagttatcattttgcgtgtgacataactttaaacatgctgaacattaattaatcaatatgtccgcttctggcacaaagcggaccacctgaagtgttgcgaggcctgctatgagcgaggagcagacgttgttaacgtccttttttgttgaggagattatggtcgagccataaactactcctcaatgattcatcaaatatttggcaatttagaacgccttataaaattattgtaggtcaatatatattcttataattcttcctttatattgttctcccattaccctatatgcaccatcaccaaaaacagtttttatacatagggcagcacctaaattcccattatcaaatgggagaatgtcaaaacctgcatttgtaagagtggcatatgctgcacctgcataagaatacgatagttgacgattttcttttattaaagatagacgcccgtcttttattagctgatttatatctttgttgtatggtgacagaatttcatcaaatctattaaaatcatgcccgaatttaaatatatctccagattgggtgtcgatatatgaaccttctctaacgtattcaatatttttccattccgtatcaatatagcacggatctgtaatcattagagagccagagtcaacaaaaacctcacctaaatctatcaattcaacttctgattctgggattataacttcatcatcaatatctaagtcatagtaggttagtgctctgctaaaatattttgctttttcaagctctgaatttagtttgtctaattgtctgtttttctcttcaatttcgctcttgttctttatcgtatcttcatttaaccttaataattcttgctctcttagttttattctattagccaatactccctcaaaaaactcaggagactttttctctaattcggtagctttatctttccaaaaaaccaagttcttttctgaaactttgatttgttcatcttttaactttatttctgcttttatattttttacataagcaagataaagccaccccaaaacagttaaaactattccatttgttcctagttgcaaataatcaattaggaccttcatgccccccccctctaatttctatgctttaaaattgatttctggcatgtaataatactcattattacatgatatcataaccgtctttatggtccaatgaaaaaaatgatataacattaacgaagtatctgggttttgagtcaacatgattatttgcacagccttgatttaatttcacgtaaacgaatgaccttcgttaatatacagcctaactaaggataatatgacttctatagcctatagttagcttatatgtgcaacagttatgattccacgttattttgctgctaacccgttgattatgtcagctcctggcacaaagctgcctgccatgcctgcttaaaaaacaggcttggcgtaggatattttccgttttcccagcggaccccaagaacgccgacggcgaagatctgcgtaagcctgattcggtgaggtgcacaaagggggcgcaattcgtcccaacactctctacccttgagcgtttacagcaaggttaaggctgcaagacacccataagaaacccgccactaccggcgggttttttgttggagttatacagacgcctggagtagaaaaaagtatattcgtacgatctcttgacggtttcgactgaataataattacaggtaacatcatgggcgaacacgcagacactccaaacaatctcaatgaaatagccaggtttgcgctggctatgtacgatcacggctattttttctcagtccgccgtgatctcagcattaattttgtccgggacatgaacggtggcggaatgcagggcctattcatcaaaaaacggagtgatgagaaggactcaattcaagtcgtatttgactacacctacagcaatgatgatgatttcctctatgaagcggacctctggacggatcaacaaaaagactacgagcctactcttaacaggggcaagcaccgattcaaagcctatcggttcgagctagagataagctgggatagtgatgaaattcaccagtggcaatctgatattgaacgacttactagaacgcacgagactcttgacgactggttaaagagcgattcggagatgctggtacgttgcgcctccacatatttctgtcggaaacccgtgattctcacgttaaacgaccttaaacagtatgttgcaatgggggtaactctagaggacctaaaggctagacttaagtgctcgaagtgcggcaagcgtggagcaaggatcgcagtgttttgatccattgagcgctgacagcaaggctaaggccgcatgccacctataagaaacccgccactactggcgatttttttgttatggccatacaggagaagcccatatctattatcgagttataaacccttgcaccaggccctgcggaatctgggcatagcagggtgagccgacaatcatcgcagggccggggccgaaccgtcccataggtgtttggcaaaacgagccaacaactactggctgtaacggcgggttgttgatcggaacatattgcggtggtggcatgttgacaactggaggcggcatagaaacaaccggctgcggattctgagggaatcctcttgattgcgcccaggctgcataacgatattgtttgtcataagcgggttgttctactgtgccatggtcacgtatgtatgaaatggcaaagtcatgagcaccccatctcgaatactgatcaacatgagtaagttcgtgtgcccaaatcgctggattattagcactggcagtatcacgaaacactatgacgtctatgagggtcacagcactagcttgcccggcttgctcaataacacgcgacagattgaggaaaccattatcctcgaccttaaatctcgccttattcatagagtcttcacttgcatacccggtgagcatttgacgaatcataggagggattggagccgtcccatttatagccgtgtttcgagactgaataatccattgttccaaggcaggggcaccagcttgtgagacaagttcattgaggcttgggccgactatcggcaatcccccgataaccccacctccgcatgtatcgcataaatgtccaataggccctagatttatatccataccgttactgttcgaagcagagatcattaaggcagtagttaaaaggcaaagccggatgttctggtacatagcttcatctccacagaaagctacatagttaaaaaaggtattgtaagaatagttgcttgggcaatatgtttctgaatgaaattatattattttaatatattaggctccgcagctaagagcggtatgaaaggtgccttttgccggacttgatcctccgacctctagtgcgaggttgttagatatcaggctgttttgaacgaggcgctgacttatactcgtatggctattgcgaaacttgattaaggtaaggagagcgctcttgtcatcttgggctgatataagaattgacgggtatgtgattgaagaatttactcattatggctgtcatttttggtacttcaaacactcggagcgagtaagggaagtggtcgagagaacttctgacgaggactcagatgatgtacgtgattttataggatatagagcaagcgctaaaacgatacaaaagcggctggaactgaacggtttcaactacctgactctgaaggaagactttaacgtcagtctcgaacgctatatcgatcagcttgagtatggactcagaacagtacaggaaagactttctaaaaacattgatgacgccttttatcttaatatgagggatatacaaagcaatattattcaagtaattaaaggaacgtcacttgacgaatggcttcaattgctaccggcggcgcgtaaggaaaaaataagacggaagcacgataaaccgtattcagatggtactccagaatggagcagctgtgatagctccccagcattacttaatgcaatgctgagtactccgttaatatattctgatagctatttggcggctgactttaattttccggtatcaaatcctgatttcttctctctggcgctgcttttaaccgtgccagatgatgcaatttgtgagcttgacctgaccgagcttattgtcgctgaatatcttgatgattttactgatcttgctgaaatagctttgtccgaaacctctccttgcaaagcctgccgcgaatcgcttgctgagctgtcggaacttgctggggtagaaccatctaactccacgcttcaaaggatgtgttatgccagcatgattacggcaatggaaacctatcttggtgacattattaaacgagaaatcatgacgcgccctgccttaatggagcgttttgtaactacctatgaaggatatagtgagatgaagtttccactcagcaatattcactctcagcttcgtaagctagataaacgagtccgtgacaccttagatggaattgcttttcacaatcttgctaaggctaaagaaatattccgtaatgtattgatagtggagtttgacaatagcagctttagcaagctttgtaaggccgtcggtacacgaaatgatattgttcatcgaaatgggaaggacaaaaaaggaaacattgtcagtcttagtattggcgatattcaggcgcttagaggagtgattttgcagtttatcagcaatattgatcagcaagtgcttgatggcctagcggcagcgtgcgcagaagattagttgttgaccgtccgctctgggtgagaagaggaaatcacagtcgttgtcacaacagttgagggtcaacttaagttgtggtctgttactcaacggtgagcaggtcaagtctgtttttcagtgtgacgactcaactagatatcatcacgcacagtcactatctcgtctcatttttctcatcaaagggagaaaaaacttttaggcacccaaataggcaccagcaaaaagttgaactagtagttaccaaagtaaattcaatagattaaaaaaccaattcagactccgccagcccaccaaaattctccatcggtgattaccagagtcatccgatgaagtcctgagagcccgcacggcgcaagccctgcgggcttttttgtgtctgtatcggtctggcgggaatgactgaggaccgcagccttgtggtgcctttttgggctccaggagaaagagccaaaaaacgcgggtcctaaaatggtaaaactcattaagaggctcattgcggctgaaagcacaagcatgaagccttcagagcagacagcccgaatatctgtaatgggtcaggcaacggttgcctgcacaatatgagaaaccgctgcgactattcaggcaaggcaatcaacggcatggaaaaagagctcttccgtcatgatggcattctctttttcgctctgatgttcacggcggataaaccagcccgtttccggcgccatgctcaggtaaaacagctgagtgattccgggggcattaacccgcattgtcatgcagcccgtttccacacctcgacagagctgttcaggtactatgctgacgtgacgatcgccgttctggagccggattgtggtgatgtcataacggcatataccgctgttcaggctatagccgatcgtgctcagatcatggatatgctttgttgatagaatgatctcaatgccggaacccgcaaaccactggctgatttgctgcaccagcgcatccatccggcggcggaatgcctgaatttccgcctcagcggatttattgccgggcggtatgctatcggagttctgctgcactttcttaaaaaaacgttctctggccgacacgttatcgcccccgttaacttttaatacgttgtgagatatgcgctgagcggcattctctttttttcatcgccgctcccgccaccttatttttcgtaaacagattaagcgcacagcactgcggcacgggcgggatcgatggcaatcagctcggcaagcaggcggtccatagcagactgcaggcggtttttgtcggtttcactgcgcccggccttcatgcgtagcagcctgaggtggcgggctttgacttcgaacagcagacctgtctcccattgtgccagcggaattccggcagcatccgcgcccagttccgccagcaggtgttgcgccagctcatttttgccggtctgctcggcaatacgcgccatcagcaggcgcagcagccagcggctgcgcacgctggtgatacccgggcggttctgcagccaggccagcgccgcctccgggccgtcgctgtcggcaaccgcgagggcctccggctccagcagcagaatatcgtcatcgccggatgcggtagcggcgctggcggcagtatcatcccgccagcctgcggcgttctccagcacctgctgttgtatccagttcagcgtgacctcatcggcaaacggcgtgccgtcgttaaatgccagtccttccagccccgtcagccgggtcagcagccctttcaggtcattctgaataatagcggcttccgcttcccgcccagccttcagcagagcctggtggatataccactgcaggtccagccacagatgattcgccccacgagaaaacatcccgtcagcctgttccagcagttccgtccagctctgctggagatacaaccgcttcagcaatgcccgctggtccggcttcggcggttcaatacgggttctgccttctgctgatagcggcggcagctgatttagcgtgtcgtggcgaatgcttttcatcagatggtgagcggccagccagccctccggctggtcaccgagatatttcgccaggatacgcgcctgcgtcagcagttcctggccggaggtgatagggctcagcgccggcgtatagttgtttgcctgagagggcgaaacatcgctgacgttctgcggcacgacggcatccgggccgcccgacttcaacagacgggtctcgaggacgccgcacagcgcatcggggacagtcccctcctgcgcctgctccatcagcaataatgcgccgctgatacgcaaggcatcagtactgccggcctcggggtacagcgacaggctgtcaagcatccgctgtccggcgagccagtcaaatgcggcccttcggctgcgctcccgcagcgggtgcagctgctcgccaaaaccctgcatcagcccggccagcagttccagtccgtccgccagaccgctttcgccatcccggtgcagccgcgcccacgcgtaatatgaggcaacgcgaatatctttggtcacggtggtgagcagtttttcggccaacctacaaatcagatcgctatccgcaccggtgatcttgttcacctcttcgcgcatcagctggaaatcatcatcgtagccgggatcgtcccccgcgggtttatcggctgacagcggctgcagccagttgttccacaacagcagacgttgttgcgtttgtaccgccagcgcatcagcagcggcctgacagactgaaatcagagtataaacattggccatcagtacatctcctctccggtcagcgcggggcaggctgccagcgccgttcgggccacggaatcagccacctgcgcgtccagcatattcccggttaatccattaaataacgcacgccgtttatttcggggccagcgcgctcatttcgtcgcgtaattcctgcgttagcgccgggtctttcaggattttttcgaactcttttctgaaaatgcgtgccctgggcacctcattctggaacgtatcagccatagcggtcccttcccgtgaggaataatgtgttaaagataacggcgtgtgatgaccaggatatagtagagcaaagcgccaaaaaatatcaacctgccggccccaaagtccattataagactttcctcagacatcttaaggcaaatgtaaaaatgaaacgcatcagacaaacaaagccggtatgtaataacaaccttttgcttacaataaaggctaagtgtatacctggcagaggaatatgaattaaattcatatctgaatagacggagttgattgatgcaaatcaatgtgcagcggaaataaagatcattcctgacactgaaaaaatcgcgaatagcgaagtgtgaaataaattattttttatggtttacaggctgtaagccgcccggctctgggcataaatatggttataattaatggctggcaagattaatataaaattcacaaataatatccggcagatatcaagtcgggattcattgggaaagcaacagaggtaggatcgcagttccgtcttcatactcgttgagaatggtaatatgctgcttttcacacctcgccccgtatgacgaagcggcgcattacgccggggaggcctcgggcgtcaccgtctttgagtcaaacctcatgcagctggattgactgctgccggaagcgatcggttgaaagcgcgatgggcaatattctgcccgccaggcgatagttgcagccatgatgtccgtcccggacatctgactgcccccccctggtatgcgggcgatggctttgcggacacgcaagtcggcggggagccgctatcgatcgctcagggaatgagttcgaaggtaatggagattaaggtatccggattcaggtccgctggcgtgctgctatacagcgagccggcctgtccatatagcgtgaccgttccgccttttaatccggatgataatactttggccattagcggatcgatttgcttatcgtaaaccatctttgaattcatcgtattgagtatcggcgtaccatcaagcttcttctctaggatattcatagacaaagtctcattcgacttgtacgactcctttccttttttatcaaccacaaaatagacaccattaggcaaaatctcatatttcttgtttttgattttagccatgattcttttttcaatatcgacgtacttagacgatagttgttcgttaagcatgttaacgatactttctatttcattttctttaattttaagttttttattataagcgtcgttaaacccggaaaccaacgctgaaggcgccagcttgacattattgtcggccattttattcacatcggatagcgcttgggtaaggtagaaaacgccgagcgcataggcatttttatgacttttatccgcaaggcttaaatcactttgcttgatggccaggctatcgatcgtagactgtaatttttatttttatcgtttaaagcagcgactgaaacatcatattctttctgcgcggttgcggcggcggcgttcagctcggcgttctttttggtcagcgcatcaagcgcggttttctgctgctcttccctctccgcgtgctgcttgttcagcatggcgatctgcgccgacagcgcacgggtggtctcatcctgctttttctgcgccgcttcggcggcggcggccagctcggcgttctttttgtctcagcgcatcaagcgcggttttctgctgaccttctctctccgcgcgctgcttgttcagcatggcgatctgcgccgacagcgcgcgggtggtctcatcctgctttttctgtgcagattcggcagcggcgcgcagttccagattctttcccgtcagcgtattgatcgtcgatttctgcaggttctcactctgctccttctgcgttttcagcgcggcaatctgcacagatagcgtgcgggaggtctcatccagttttttctgcgccgcttcgacagcggcggccagctcggcgttctttttgctcagcgcatcaagcgcggtggtctgcccgctttcgttctgtgcacgctgtgccgtcaatgcggcaatctgcgccgtcagcgagcgggtggtctcatccagttttttctgcgccgcttcggcagcggcggccagctcggcgttctttttgctcagcgcgctcacggcggcagtttcgccgctctctttccgtacacgctgttcactctgagccttcagctcggcgatctgcgccgacagttcgcgcgtcgtttcagcgcgctttttctccgccgctttggcggcagcgctcagctccgcattctgtttccgcagagcgttaatcgtactctctgttttattctgatgacttttttttctgacgacgtcctgcttctgaggcgtttttttatcagggctatcgttattttgcttagacgagaccgactccccgctggcggcgcctgaggccggcggattgtttatttcgagtttcgatatattatcaaggaagtctcccggctcagcacgagcaggaaacacaacaataagggtaaaaagagcaaatacaatcgcaggacctcgtagattgcatatattcagtttccccttagcgtccatcatctggccagcccatccttgagttcagcttttcttgcccggctttcaaactctttaattaatttctgcgaaatgctattacacttatcgtttatcttgtattcaaaaagcggtgtaatcgttgattttacgctggcggaggtttggtctgaaacagaagcataaaacttagcgtcattgattaaaccatacagctcgtttgaatcctgctgaaactttttatcgagcttaactaaagcgtcggcatcctggatacactgctgtaaagcaggaacctgcgcgggctgttcattttgaatgacatctttttttatgagtgcgctctgcggttttttaccattagtacacccctgtaataaacctacagaaatgcacaccaatgccaataagctatttcttatcatcttcccatccattagaaaaaaatacgtcaaaaatatatttatcgattgcagcagaaaaatttttaacaaacaacgtcaggcgttggatttaacattaattcagaaaaaacacacaaaaaggtcattttttaaccagatcaggaatgggaattatccaggtgcaggacgatatttttatctaagctttttctcaccaccatatgattaatggcacattaccttatatatgcctgatattgagcggtctttttacaattctaatcaggcataagctgttactcattcaatgcgaatctcattcgctccacttcggtctggccaccgtattcttcttgagtagattgcgaaactccttcagatagggttcgttgctgcgcccgcgcttgcatatcgccgagaagggagattgaaagccaaactcattgggcagcagtacgcgcaggcgattctccttaatccacggccaggcgtagtgctcgggaaggtagccgatatatttcccggagaggatgagcagcagctgcgcatcgacggtttcaacggtcgcgctgcccttgctgaacccgcgccgccgcagatcgctggtattccagtagctgcgcgtcaccagcggacactggctgatcagctctttatcgagctgtcgactgaagaacatgggatgcaggtcgctgcagtagagccagtgctgctcgcgatagagcggttcgctgatgatgttatgcacccgcgagttgtagctgccgatggcgagatcgatatggttattcaatacgccgttaagctgttccgccggggtacggataatcagcttgatatgcacattaggaaacttatcgctaaagctgcgcagcacgaccggcagcgacagcgcggtctccgtctcgatggaatcgagcgttgagatacaaatcgtgccgctatgctcgcctttcagcagcgccgactggcgctccagttcattcagttcgctcagcacgcggatcgcctgctgtaaaaaatgctgccctttttcggtcaacgcaaagccgccgcgcccgcgctgacacaggctaaagccaagctggccttccagctgcgacatcgcattgctgatcgcggaaacggaaatccccagctcctgctgggcccggccatagctctcaagacgggccaccgcctcaaaaacctggagctgtcgaatgttaagcgtcgcgtcgttaagcatagcgtcttagttcactaataaatgaactaagtatttgcggcagacgatttaaagtccagcacatctttcgcactatccctgctgttgagttttgtttgtcagattcaggagctgaaatggataacgtctttcatcaaccgcagggtggcaacgagatgccgcgttttggtggccgcgccacgatgatgcgcctgccatttatcgaagatttacagggacttgatgcagcgtttgtcggcatcccgctggatatcggaacctcacagcgttccggaacgcgctacggaccgcgctatattcgtaccgaatcggtaatgattcgcccgtataacatggccaccggcgccgcgccttttgattccttgtcggtggcagatatcggtgatgtaccgatcaatacctacaacctgctcaaatcggtgcagattatcgaggattactacaccggtttaaatagttttccgcttatccctctgacgctgggaggcgatcacaccattaccctgccgatcctgcgcgcgctgaccaaaaagcacggtccggttgggctgattcacgtcgatgcccacacagataccaacgatgaaatgttcggcgaaaagattgcccacggcaccaccttccgccgcgccgtcgaagaggggctgctggatcttaaacgcgtcgtgcagattggccagcgcgcgcagggctacgccgccggtgacttccagtggggcgtcgatcgcggttttcgtctggttcaggccgagcagtgctggcacaaatctttgactccgctaatggccgaagtgcgccagcaaatgggggctggcccggtttatctcagcttcgatattgatagcctcgacccgatctgggcccccggcaccggaactccggaagtgggcggactgacgtcgattcaggcgctggaaatcgtgcgcggctgccgcggtctgaacctgattggctgcgacctggtcgaggtctcgcccccctatgacgtcagcggcaacacgtcccagctggccgccaacctgctgtatgaaatgctctgcgttctcccgggcgtgaaatatccatagaggaaaaaccatgcagcttaacgtctttcgcacgctgtggggcgtcaccaccccgtggcagcaaacggtcagcgaactccggagcgtcggctgctgcggcattgaagcgcgggttccgctgacgccagaagagcagcggacgctggcccaacgcatcgaagcgtccgcgcttgagtatatcgccattgtgttcagcggcggcggcgttattccggcccaggccgagacgcccgcgcagcatctggagcgcttaaaagaacgttttgcggcggcaaaagcgcttaatccgcgcttcgtcaatctgctggccggtaacgaccgctggccgctggcgcagcaggtggattttctcggcaaagcgcatgagctcgccgccgaatatgagctgttctgcagctttgaaacccatcgcgccacatcgctgtatagcccgtggctgacgctggagataattcaacagctgccgcagctgcgctttaccgccgatatcagccactggatcgtggtaagcgaacgcctgctggatgacccctgcgatgacttcagcgcctttatcgaacgggtccaccatattcaggcccgcgccgggtacgaccaggggccgcaggtgccgcaccccgccgcgccggaatatcgggcggccctgcggtttcagcagcgcttctgggaacagatctggcaatcgcagcgccggcgcggctaccagcacaccacgcttacgccggaatttggccccgatggctacctgcatcacctgccgtttaccaacgttccggtcgccgacctgtggtcgctgaacgcctggatggcccagcgtgaacagcagcattttgttgaattcacctcgcaaactgaataaggaacggaagaaatgaccgctgcaaaaagttcgtttactgaattaccgaccatcgatatcagcgacctggcctgcgacgatctcgtccgacgccaggcggtggccgacgccatcggccaggcggcccgcgaagttggctttttctacgttaccggccacggcatcgcgcctgaactgattgccgggatccgcgcggcggccaaagagattttcgccctgccgatggagcgcaagatggcgtactacatcggacagtcgaaaagccataagggctacgttcccgaaggggaagagatttacggctccggcaagccggatcacaaagaggcgtttgatatcggctttcaggccgccgacgaccacccgttcgtcgtggcgaaaacgccgctgattggcgccaacgagtggccggacgtgccggaatttcaatcccgcgtgctggcctactatgacgcggtcttcgcccttgggcatcgcctgtttgacgccttcgcactcgcccttggcctgccggagggctatttcaggtcgatggttacctgcccgccgtcaaagctgcggctgatccactacccctttgacgccagcgccgaagatgttcccggtattggtgcacacaccgactatgaatgcttcacccttctgctcgccgaccagccgggtcttgaagtgctgaatgaagatagcgactggatcgacgccccgccgctgaagaacgcggccggagaagaggctttcgtgattaatatcggcgacatgctggaagtcctgagcgctggcacatttgttgcaaccgcacaccgcgtacgcaaggtgccgcaggaacgctactccttcccgctgtttttcgcctgcgactaccacacgctgattcgcccgctgccgggcttccttgaggcaggcgaagccagcgaatatcaagaactgagcattggtgagcatatgtggagccaggcgttacagacctatcgctacctgcgcgagaaagtcacccgaggcgagctccagctccccgaacgcgcccgcggcactaacacctttggccatctgaaaaaacaagcacagcaaaaaaccgtaaataacccgtgaggataaatgatgaacaaaacgctaaaaaaactctcgcgccgtgtggctttatccatcgccgtcaccgcttgtttttcaccgctggctcaggccgctgagttgctgaccgagggcgtctttaaagtcgggatggaggtgacctatccgccttttgaatcctatgacagcaataacaatattgtcggcatcgacccggagttcgcggcgctgatcgccgaacagctgaaggcaaaaccgcagcttatcgacacgaaattcaccagcctgatcttaggtatcggtaaaaaatacgatgcggtgatctccgggatgtacgtgacgcccgagcgccagaagcaggcggacgctatcccttacgccctgtccggcgcgtccattattgcgctgaaaagcagcgccattcagccaaaaacggaagacgaactgtgcggcgtgaaggtaggtctgcaggcgggtaccgcctgggtttccagcctgaaaacgcactccgacgagtactgcctgaaaaacggcaaaccggccattagtattcaggaattcccgaccgcgccagaagcctcccaggccctgctgtcgaaaaatatcaacgcccagttagaaatcgccccggcggcgcaaattatcgtcgagaaaagccgcggccgcctggccattagctcgaaccgtctggtctatccgctaccgctgggaatttacgtcgccaaaggcaacaccgagctggccgaggccattaaatcaacgttagccacccttaaagccaacggcaaatatgacgccatcatcaagaaatacaacttagaaagcatcaattaatacaataattaaacgggagtcggtatggagttcgattggggatactttttttcattatttagcgttggggcattctggcaggcgtgtgtcaccgtggttgtcgtcagttcattgtcctggtttattggcctgatattaggttttcttttagcctgcgcgaagctctctggcccgcgctggctgaaggttcccgtcgaactctatatttggtttttccgcagcgtaccgctgatggtcctgctggtctttgtctataacctgccgcagctgtttccggccacccaaccgctgctcggcgttccgtttattgcggggctggtctcgatgacggtgaccgaagcggcctacatggcggaaatccatcgcggcggcctgctttcggtcgccagggggcaaagcgaagccgggcatgccttaagctttagctttatcgggattcagcgcttaattattatcccgcaggcgtttcgtatttccctgcccacgctgattaacgaatacatcaccatcatcaagctcagctcgattctgtcggttatttcgctgccggagctgctgctgaccggccagcgcctgtacgcgcagaattttctcgtcatggagacgctgctggcggtcgccatttactacgttatggtcgtcacggtgtttagctggctgttccgggcgctggaaaacctgctggatattcagcgtaagcgcccgcaaacgctcaacgagcatgaatgcgaaaccctgcgccagaacctgaagccgccggtacagacgcaaaaagcgcaggccgccagcggcaacccgccggcgctggatctgcacgccatcgaaaaatcctggggccagcaccacgtgctgaaaggcatcgacctgaaagtggaaaacggcgaggtaatcagcatcatcggcccgtccggctccggcaagaccaccctgatccgcaccattaacgcccttgaaagcatcgacggcggcgagatcattctttacggcgaggattacctgaagggcgcctccgttgttgataaacagcaaatacgcgcgggcgtacgccgcatcggcatggtgttccagggcttcaacctgtttccccatcgcacggtgctggataacgtgatgctcgccccgctctatcacaagctgctcgaccgcgccgccgccagagagcaggcgctgtggctgctggatcgcgtcggtctgctggcgcacgccgaaaagtacccgtaccagctctccggcggccagcagcagcgcgtggccatcgcccgcgccctggcgctgaaaccggacatcatgctgtttgatgaacccacgtcggcgctggaccctgaactggttggcgaagtgctgaaggtcattcagtccctcgcccgcgaaggcatgacgatgattatcgtgacccacgagatggacttcgccttatcaatttctgaccgggtggtgatgatggaaaacggcgtcgtgcagagcgatatgccgccgcagcgcattcgcagcgatgccgccgatccgaccctcacccgcattcgtgaatttatgggagtgcaataaatggtaactgaacgggaactacgccagcagctggccgccgcctatcgtctggcggcgctcttcggctgggaagacacgctgtatacccacttctccgtgcgcctgcccggtgacggcgagccgcggtttttgattaacccctttggcatgatgtttgacgaagtcaccgccagcaacttaattgtggtcgatatgcaggggaaggtcgtcgagggcagcgccccggcaaactcggcgggatttaccattcatagcgcggtccatatggcccgggaagacgcccactgcgtgatccacacccacacgctgccggggatggccgttgccgcctgcgcagacgggctgctgcagcttaaccaaatcagcaccgaattttatcaacgcgtcggctaccatccttatgaaggcgtcgcattcgatctcgatgaacgcgtgcggatccagcgctcgctcggcgagaacatcgctatgatcctgcaaagccacgggctgctgtcggtcgggcgcaccgtcgccgatgcgttttacatcatgtactacctgaaccgcgcctgcgagatccagatggccgccgcgcagctggcgccgctcggccccatccatacgatacctgaaccgctgagccggcacgcctgtgagcagctgatgggggttgaacatgaacgccagctggtgtggcaggcgtggctgcggcgcctggaccgtcttgatacttcttataagagctaatgcctatgactcagttcaccatcgtcgtggattgtaacgatcctcagtacacccgggagatttgcgccgcgttcgcgctattcccggaagtgaaagcggttctacccgaggagcccgccgcccgcgaggcgcaatacgcctgctgctggtttcccgacccgcagctgctggcgcgctcgcctcagctgaagctgatccaggccgcgtctgccggcgtagaccatttgcctgccagcgttttcgccagcgacgttccgctctgccgggtggtggatgaagattttcgtcacggtatgtttgaatacgcgctgtggggcgtactgtggtttcagcgtcgctttgaccgggcgctggcccaccagcgcgagcgcgtctggaagatgtatccgcagcgagcggcggccgattatcacgttggcgtcatgggcctcggcgaaattggcggctatatcgcctcgcagctggccgcgctggggtatcgggtttccggctgggcgcgtagcgaaaaatcccttgccggcgtgcgctgctaccacggagagacgcaggctggcgaattccttggccagctggatgcgctgatcaacgtcctgccgttaaccggggagacgcgaggtatcctcgcccatcctttactgcagcagctgcccgacggcgcgtcgctgattaactgcggccgcggcgagcatatggtgaatcaggacgtgctcgaggcgctggatagcggcaagctgtccggcgcggtgctggacgtcttccccgtcgagcccctgccccaggaggacccgctgtggcaacacccgcaggtggcgatcacgccgcatatggcctccatcgcgcagacggaggtgattgcccgccagctgctggacaacatccggcggcagcagcaggcgctgccgctgaaaaacctggtgaacaaacggagtggttattaaccttgcgcgtcaacggcgggatgtccgtgggttaaccgttgctccgtctggttgatatgatgctcaatgaccgcccggtgcgtatcgtccggcggtaatcgttttagcagcaaccgccacgccgtcagcgcctcgctgaaatgcgcctgctctgatgcactgagcgcatacagattaagcaggcggtcgttaacgcgctggccctccatcagttggcgcaccagcgcaccgccccgcgggtcagatacccgcagcagcgcctccgcatagccaaatgccgcactatcgttatccggagccagcgcgtaagcgcgagcataggcttgagtcgccatagcggcgttgtccaggaccctgccgagacgcccgagcataagccaatcctcaatagaagcgtccggattttgccacagcgtcgtgcgtagcccaagggccagacgccgcagctcgtcttcatcaagcggctgcgcctttggatcctgcacccgcgccaacagagccggcgtctgagccaccgcctgctgccagcgttgcacctgctgatagtggccggtctggctatagctgaccgcacctaccgccagcgcaagcgccgcgccaggtataaaaatccacggcccggcggatttatcctccggcgcccggccgtcagaaaacgtctcctgccctggcctgacgcggcggcgggagcgggccactatagcccaaccgcccatggcgatcgctgcggccggcacgacccacagcagcatcgtcagcggggttaatggcggatcgtaggtaacgaagttgccgtagcgcgccaccatgtagtccacaatatcgctgtcgctttttccttcctgcataagcgtaaaaactttctgccgcaggtcggccgcgatcgcggaactggaatccgcaatgctattgttctggcatttcgggcaccgaagctgctccgtgagcaggcgaaaccgctgttcctgctcctcgtccttaaacggcatgacatcaatagcggccagcgcgtttgcgcaaagcagcagcatcagcgcgctcagtaataatctcatggcgcagcctcccggctaaacttctcccacagcggcctgaattcgcgctcccacacccgatcgttaagatcccccgcgtggcggtagcgaatgatcccctgtccatcgatcaaaaacgtctccggcgcgccgtagactccgagatccagcccgagcatcccgtcgccgtcaaacaggctcagcgcgtagggattgcccagcgtgttcagccagccaattgctttctgccgatcgtctttgtagttcagacccaccacgcggatcccccgcgcggaaagctgattcaaatactgatgctctgcgcgacaggtcgggcaccaggtcgcccagacgttaagcagcagcggtttgccctgcgccagcgcatccgactgaaaatactgcccgggatcttccagcgcctcaagacggaaaatcggtaccggttttccgatcagcgccgattccaggctattgggatcgtccccttccacattacgcgccagctgccacagcagcagcatcgcgatagccataaaaatgaccagcggcatcaacaacgtacagcgcttcatctggcctccgcgccaggatatccgcggcgcgggcgatagcgcggatcgcacaggcacaacagcccgcccagcgccatcagcactcccccggcccaaatccagcgtacgaacggtttataataaaggcgtacggcccaggcgccgttgcccagctcttcgcccagcgcggcatagagatcgcgggtaaatccgccgtcaaccgccgcttcggtcatcatggcgctgctgctgtggtaaaagcgcttttccgcattcagtatcgcctgcggttcgccgcgtcgcatgacgccaatcaccgcgacggcggagcgatagtttgggccgatcgcctctttgacctcacggaaagaaaagcgatattcatggacatcgacgctgtcgcccacccgcatgcgcacgtcgcgctccacgctgtaattttgactaaaggcgatacccacgagggtgaccgccagcccgaggtggcctgcgaccattccccagtagctgagggtcatcctggcgccgcgtgaaacccgcaaagcgatctctactcccgccagcacaaagacccaacaggccatcgccagcccgaccaccgtcatggcgacaatcttatcgcccaaccaccacggcaacagaagcgacagcgccagcgtgcttgcgcaggcgataaccagcagcctcctgagcttacgcgggcgatcgcgcccccagcgcaccagcgggccgatgcccatcaggagcgcaaacggcgccatcagccagctaaacatcgtattaaagaacggcgcgccaatcgaaatactgccgagacccagctgtttatgcaccagcggcagcagcgtacccagcagcaccgtgagcatagcggccatcagcagaacgttgttgccgagcagcagcgactcgcgcgaccagagcgcattatttacccgagagcggactttatagccacgcatggcgaacagcagtaaagagccgccaatgaccagcaccataaaggccagaataaacatgccgcgcgccgggtcggaggtaaaagcgtgaaccgagaccagcacgccggaacgcaccagaaaggtccccagcagacagagcgaaaatgcgcagatagcgagcagaagcgtccacgccttgaagctggcgcgctgttcagtgaccgccagcgaatgcagcagcgcggtgccggccagccatggcatcagcgacgcgttttccaccggatcccagaaccaccagcctccccatcccagctcgtagtaagcccacgcggagcccagcacaataccgagcgtcaggaaggcccacgccgccagcgtccacgggcgagagaagcgagcgaaggtgctatccagccgcccgctcaacagcgcggctatcgccagggcaaaactcaccgagaagcccacatagcccatatacagcagcggcggatggaaaatgagcccggggtcctgcaacagcgggttcaggtcgcgcccttcaatggcaaattccggcagcgtacgggcaaacgggttggaggtgaacagaataaacagcagaaagccaacgctgatcgttcccatcaccgccagcacccgggcgacaatatcaagcggcattcgcctgctgcgcagcgctaccgccactgtccagccgctcatcagcagcacccatagcagcagcgaaccttcatgtgcgccccaggctgcggccacgcggtaccggatcggcagctgagtattggcgttactggccacgtagctcaacgtaaaatcgttggtaatgaaggcgttaatcagcaccataaaggcgcccataatgaggatgaacagcagaacggcaaatacccgggaagaggccatcattcgcctgtccccccgcgccgcgccccacagcggatagacggaaagcagtagcgcgacgccaagcgccaggcacagcagcccgttgccgacttcaggcatcataaggatgtgtccctgtaggcgctatccgggcgacgatggttgctctccatcgctttttccacgtctggcggagtgtagttctcatcgtgtttggcgagcacttctttcgcctgtatccggttgtgcgcatcaagctcgccctgaaccaccacgccctgcccttcgcggaacaggtccggcagaatgccttcgtagctgacgtccaccgaaccttcggcgtcatagatgctaaaactcacctgcagcgaattcgcatcccgcttcacgctgccgggcgtaaccatcccgccgacgcgcagacgctgaccccgctcgggccgctgctgcgtttcgcgcttgccgtagaggatttcgccaggcgtatagaacaggtcgatactggaacgcagcgcatagagcaccagcgcggtggtcagcgttagcccggcgagcaccgcgagggcgacacacaggcggtttttgcggcgaatattcatgtcgcctcccgcgccgcgcgcctgcgggcttcacgggcgcgctgccgggcgatatcgcgcagaatgacacgatgcaggatcgcgctgtgcgcgaccagcgccgccagcggaagaacggtcagcgccaccgccagccagacataaaaggcatagccgcccatggccaggaaatcactccagcttgtaaatgcgctgctcatcgacgacctctttttaaaatcagttcactgacccacgggcgacgtttttccatgagcaaaatcagattccgcatgcgcattagcgccagcgtgataaacagcagcaggtagccgataatcgccagccgcagcggcgcgcgcatcgccggggcgatgctttgctgcatattcgttgagccctgatgcagggtgttccaccactccaccgagtagtgaacgatcggtaaattcaccacgccaatcagcaccagaatagccgccgcgcgcccggccagacggcgatcgtcaaaagcgtgccacagcgctatcgcgccgacgtagagaaacagcagcaccagctcagaggttaatctggcatcccaaacccaccaggttccccacattggcttaccccacgcggaaccggtcaccagcgccacaaaggtaaacaccgcccccacgggcgccatcgccgccagcgccagattggccattttcatctgccagaccacgccgatgaacgccgcggccgccatcagggcataaatgcccatagaccacattgccgccggaacatgcagatagataatgcgatagctctcgccctgctgatagtccgcgggcgcaaagccaaatccccaggcccagcccgcgatcagtaccaacgcgctggcgccgcccagccacggagcgaccctgccgcagagctgataaagccgcggcggattcgtcagttgaatccctgtttttctcatatttcagtcaccagaaataaagataaatccattgataagcccgggcctgaatccccggcgccgcaaacctgataagcgccatccatcaaaaaccgcgctagtgcagactgacgcgtagcgccgccgccgtcgcaaaggggcttaacgttgcgctgcccgccagcagcgcgcccagtatcgccatataccccgtcacgggcagatgcatggaggccgcatccatcgcggcggtagcaaaaataagtaagggaatagtcagcggcagaaccagaatgcttaacagcgtgccgccgcgcttaagtccgacggtgagccccacgcccggcgcgccgaggaaccccagcgtcggcgtccctaacagcagggtcagcgccataattttccagccatagacgtccatgcccagcagcagagccaccagcggcgacaggatcagcaggggcacaccggtgaccacccagtgagccatcactttagccacgaccaccgccggcagcggcaaaggcagcagcatcagctgttcgaggctgccgtcctgtaagtcgtcgcgaaacaagcgctcgagcgccagcagcgaagagagcagcgcagcgacccaaataatgccgggcgtcagccgcgccagcagctgcggctccggaccaacggcaagcggaaacagcgtaatgacaatcaaaaaaaaccacagcggattggcgatttccgcgcgatggcgaaacgcgacccgcagttcaaggcaaaaaatccgccacatcacggttccgccctctcgccgcgcagcgcaatgcgtcgaatcctgtcggatgccgcgctaattgattgatgggcagtgaaaatgacgatgccgccttgctccgtgtgctgcgccatgcgctgaatcaggcgttcgacgccctccgtatcgacggcggtaaaaggttcgtcgaggatccacaggcgggcgcgggtcagccagaggcgcgacagcgccacgcgctgctgctgaccggcggagagctggttaacaggaatatcgtcgaagccggcaagcccggcctgctcaagggcctcccggcactgggcgatatcatcgtgttgatggagaaagcgcaggttttccatggcggtcagcctggctttgattcccggcttatggccaatccacagcaggttttgctggtagctatcgcgaacgcgatgcagagggcggccttgccagtagatttctccggcatcagcgcgagccagcccggtaagcaggcgcaggagagtggttttccccgcaccgttgcctccggctatctgcacccaatcgcccgccgaaacgctgaatgaaaaatctttcatcagcgtccgaccatcgcgttcgcagtgcagtttaatggccctgagccagctccgggaactttcgctcatcatcccgttattgccccggctgatacggcgtataaacaccggtcaggctatgcagaaaagcgacaatatcatcgatatctttttgcgctaaatccgtaccgacctgatagcgcagcatcagttttactgcgccatcaagcgtcggaacatcaccgcgatgaaaatagggcgcggtgagcgccacgttgcgcagacccggcactttttggcgtaatttatcccgtacctctttcgtcacattcattcggccaatatcagcagccgtgatttcaccaaaattaaaatcacgcttcagccccagcggttcaaaagagcggccgccgagaataataccgccgtgacaggtagcacatttattatctttaaatagctgatagccatgtttttgttgcgcggtcagcgcgtcttcatcaccgcgcagccaattatcaaatggcgcgtcgggggtaattaatgttttttcaaattcagcgatagcgtcagtgatgcgctcaccgctaaaaccttgcggataaacggctaaaaaatcctttttcaatacgggatctttatccagtttattaataatgtctccccaggattttgatgccatctcaatggggtttaacggcgggccaccggcctgttcttgcagcgttgatgcccgtccgtcccagaattgctcaatattaaagacggagttaaataccgttggcgcgttaattggcccaacagcgccccccacgccgatagacgtttttctgccatcgaccccgcccgcgtttaacgcatgacagtgtgcgcaagaaatagtgctatccccggacattcgcgcgtcgtgataaagacgaaaacccagcgcagctttccgctcatcaacgggcagctttttagggatcggctggagaggttcattgcgatgctgcgcggcggtatcagcgctggcgtagtagcgctcgcgctggtgcttaatccagttgagtatctcaatacgttcgctgtcgctaacgccgccggcccagtgcagcgcgacgtatcgcgtaggcggcatcgtttgatgctgcataacccactcaatcttgtttaattcactttgtgaaacgggtttatcgtcaatcagtgacgtacgcacggattgaaggttaaaggatttgtatcccagctgtacgtcataatccatcagctgtttggcaacgggaaaagcggcgtaaaagggcaactccgccgagggggtatggcaatagtcgcaacctttttcactaaaaaaagagaggactttattattctcggcaaccgccgagagccggacgtcgttttttttaatacgctgactgtcgtaataccagatatagcctgacaaccctaaataacataacacgcctgcggtaatgaccgaggctgtaatggtcgcaattttcttcataagatcattcctttgaggcattgcagctgagataatgacgttttatatttatagtttcacgtaacatcatagcggtgacgacgccgtggatattgattagcgtcaaagccgatgacaggcaggacctatagatataataaccacaccctatcatcactatattattctgcgctgcgcgcggcagctaaaaacctcactcccttgctcaattttccatgtattcattcttattatataaacgggtaaaacattaatgagaggattcacattagcgtgtttccattaagcagtaaaaaagagagatgaattttatctcaccctaccaattcatattttaaatttgctctcgcggcagaaataaaaagcggaaaaataattccgcctgcgtttgaaaagctaagaggattaaccccttagcgttgggcgtcggcctgccaacaatgcgatcagcgcaaccgcaaccggcaccagcgatccccacagcacggcattccagccgaagaggttcatcaacgcgcccgaggaaaatgagccaatcatcatgacgccgaagacaataaaatcattcagcgattgcacctgagttttctcttccggccggtggaaatccataatctgcgccgacgcgccggtaaaaccgaagttccagccgatacccagcaggatcagcgacagccagtagtgcatcacgtcgataccggcgaggccaaccatcaccgacagtagcagcagaactaaaccggccgcgttaatacgccgggcgccgaagcgattaatcagcttgccggtaaaaaatccgggaccgtacatggcgatcacgtgccactgaatgcccagattcgacgcctgctgggagatcccatgcatgtgcatggaaagcggcgccgcggtcatcaggaagttcatcaccatataggatatcgcgccgctaaaaaccgtccgggaaaaacccggctggcgcacgatttcgcccagcgggcgcccgcccgatttggcctgcgccgccggctcgggggtttttactcccagcaagaccagcgcggataccgccgccaccagcccctgagcgataaaggtcatcgcaaaggtgtgcggcggccacaaattcatggtcgcggtcaccagcatcgggccgatgatccccgccgccacgccgccgcccataaccagcgagagcgcccgcgcgcgccgctcgccgctgacgccgtcggtagcggcaaagcggaaagacaccgccaccgccgcataggcgccgccgaaaaaggccgcgagacagaacagcccgaacgaaccgatcgcgaccgccagcgccgccagcgctcccgtcaacacgccggcgccggtaccgaccataaagaccgttttgcgcccgcgtcttctggccagcgcgccaaacggcaaaatacaggccgccatacccagcacaaaaatggtgatgggcagcgtggccagcgtcggcgagggcgcgatggcgttgcccacaatcgccccggtggcgtaaaacaccaccgagtttgcccctgcgagcgcctgcgccgtcgccaggcgaacaatattttggttttgctgtccgacgggcagcgttatctcagcgctcatgactctctttatcctgaattcgtttgcgttatgccaataccctgactgacataatgaacgtaatcaggcatgacgaccagccatcacgccgccatcaatatcccaaaccgcgccggtcacccagcgggtgctatcgctgagcagaaacgccacggtttgcgcgatatcatcaggcgtgccgacgcggccaatgggatggaagccgtcaaagctgttcatcacatccttcacatcctctttagggataaacccttcatatatcggcgtatgcaccaccgccggcgataccgcattgacccgaatcccgctgccgcccagctcaatcgccagatttttggtcagcgcatgcagacccgctttcgccatggagtaggctgacgacggcgttgcgccgatggcctgctgcgcccacatcgagccgatattcacaatcgaacctttgatgccattagccagcatattgcgcaccacctcgcgggtaataaaaaacgtcgcgcggttgagatgcatataccgatcgtagtcagccatttcatgttcgataaacggcttcgggaagaaaacgccggcggcgttgaccagcaggctgatatcctgatgttccgcgttaatagcggccataacctgctgcataccgttttcgctcatcaggtcagcgacgataacatccactttccccactgccgccagcgcctgacgcgcctgttcggccttctgccgacgattgcccaccagtaccacgctgccgccattctccactacccgtttggccgtcgccagccccataccgctggtcccgccaaccactaacagttttttccccataaacgccgtattcatcattcacctcttcacgcttgatttgtgtagcctaagcatgcctttcctgcagcgcgctgacgaatgagaagaaatagcccaacgacaaagaaaatctatcttgatgacctatactgagacgcaaattcactgagggatattcaccatgcgatcgcttaaccgactgaaatggcttcacgcgtttgaagccaccgcccgccacggcagctttaccggtgcggcgcgcgagctgggcgtgacgcccgccgccgtcgggcagctggtcagggcgctggaagagtgggtcggccatccgctgctgcaccgtacccgtagcggtaaagagcgtctcaccctggtgagcgaagcgcaggcggcgctgcaggatattactcaggggctggataagctggagagcggactgaataagcttcgcggccgccgggcgcgttccgtggtggtgattaccgcctcgcaggtgctgatgatgaactggctgatggagcgcttaaaccgcttctctgaagtccatgataatatcgacctgcgtctcaacgttacggaaaagctgatggatgtggcccacggcgaagcggatttggcggtacgctgcggtcgcggcgactggcccggggtcaataaaacctggctgatggatgaagaagcggtgctggtatgcagcccgctaatcgtcccggcagacaaaaccgcctgcggcgagtggctggcggcgcaaaagctgattcatgatgatacgccctatcccggcgccagttttccatcatgggcggaagtgctggaggccgctcaggcgccaacggcgcgcgatagcgggttgcatattaactcaacgtcggcggtcatcctggccgcgctcagcgggcgcggcgtcgctattgtccgccgggcgctggtacaacagctcctcgccaccggccagctcgttcagctacacccggcccgccgctggccgctcacctggtcctactatattgtgacgccccagcatgcggtcatgcgcccggaagtgaaggtgttttatgactggctgcttcacgatgtgctggcggaagacccgatgcgctgattatcttccgccacacccgcatagaaaacctttattgctttatggttttagctggtcatgaatgcgccacttctgtttcagcacgtttttgtcctggctggccagccactggttaaccttgtccagcagctgcgggttatctttattcatcatatagactttgaagctggcggtgcccgggaacggctgctcattggccacgcaaaacacgcccggctcattgctctggtaatagacgccctcaatcaggtcggtcaccatcatatccgccgttttctgccgcagcgcttcaagattatcgatattgtttttcacccgaataatctgcgcctgtttgatatgttcatcgacaaagctttggttggtgccgcccggattcaccaccaccttcacgtttggctggtcgattttttccaggctaccgagcgccggcgccgccgcgcagttagccagcgcaatcttgccgttcggcaccaccggctggcttaacgcgaaatccttcgcccgcgctgcggtttccgtcaccccgcccatggcgatatcaaacttatcggccttcaggtcggcggagagcgtgggccagctggtcgtcacaaagctcacctttagcccaagccgcttgccgagatctttcgccatatcaacatcgtagcccaccagctccccggctttattatgaaacgccagcggcgcgtaatcgcccgggacgccgactttaagttcgccgctttgttgaatgctgttcatgtcgcgcgcctgggcgccaaaggcgacggcagcgatgacgaaaacaagacctgacttcaacttcatcgttatatccttgttcaaatgtgaaccgtttatgattacaccgcgctgcgcagcggatgctgtttattgtttataaaatctttaatcatggataccgtcaataccggcggcgagaaaggcggcatcgttccttcggccacccgcccggcgagctgctcgcaaaagcgctcaacctgattaaccggatacccggcaatatcctgggcggagtaacgccaccatcgtagcgccatcagctgctcaataatcgcctcgctgaagcgcatgcggatgatcttcgcgggattaccgccgacgatggcgtacggtgcgacgtctttgaccaccagcgcgttggcggcaatgacggccccatcgccaatagtgatcccctgcgccagggtgacattctggccaatccacacatcgttgccgatggttatcggccggggggtttttgcaaaaggataaaactggttggtcctgccgctatcggcggccagcgtcgccatcacgccggaatgatgggcataaaacaccgggctggcgctggcccactccaggggatgtcggtcgccgagcacctgtaaccgatcggcaatcgacgtgtagcgccccacgttaatcagcgccggcagcagggttcgcgtatagctaaaggcgcccagcgaggccagccgttcgccgcagcgcccccagtaggtggtataggcctcggtggctaagttttccggtatctcaatcgacaggtcgtcacggtaaaaggcgtggctacaggccagcgtctgcccgccgacaaaaatccgctgcgcctgcaatagtggcttaagctccccaaaggcgattttcattatcgattttcccgcacaaaagtattcccggacagccgcttaatctctcgatcattgatagcgtaccgatccgctcgccgtgcgaaaaatcgttatgacttctcttttttgtgagcgacagcgcgaaagcgacggtcagttatactccagcgcaaacgtcaccatgctattggcggtaccggcggttaccgcgtcatccgtctgtacgtactgggcgttaaagttgatattttccgccgcccccgcgctgctggcggtaatccgcttgagtacaggtaagttactggcctcattgattttgacgccggttccggcggcgggcgctggggcaccgttactgccgtaggtgagcctgacgcccacaccgctcgcggaggcgtttgctttacttagcgccagagtatccgttcccccggatggcgaggtgacgccaaaaaagccgatgcggatatcggttggcgtggagcagaagaccggtatggagaagcgcttcgcgacgccgccggtggtgtttttgcccttaaactccgctttatttaccgtgccgaggctaacgtgaatattcgcggttgaaacctgacagctgccgctgccgccgatatcgacattcagcgccgccatatcgagcgtgaccggcgagctggcgacaaaaccgctgcggctgtcggcctgctgctgaatagtgagttcgccaatctgcggctgcgccggaacgtttgcgtggttgccgctgaccagggcgacattgccggtcttataaaacgtcacaaagactttcaccacaatctgctgctgattcagcaggttagccatctcattgctgtcgcaaaccgtcacggattccccattaccggccgcatggctgccatcaataaagcgaacggcgccgccgctgcactggaagcccagcgagtatcctatgccgtccagcgctgaggggaacacgtgctgaccgccgattgacagcggcgttgaggccgtttttagctgccgataaaccagacgctttgccgccgctttcggcacctgaagatcgcaggagaaatgaatcccgctgccgttatccgccatcatgccggtcatctgggtattcaacggcagcgtgggcaggtacttgatattctggacgttcacggtcatctggccgatatctcctctgcaggtttccgcccagccgctgtggctataaacccccgccatcagcaggaataaaaacgatactatgcgcaaaatcacctctgtgcagacctactggcagaggccagagacggttttaaccggactctgccgctgctgtacggtatcggtaagatggaaatgcagcgcgcatctccgtgagagattgtcggcgttccaggcggcatcgagcgtcccttcttgcggaataccgctcagatagacctgcccgccatccgccaccatgccgcccggcgccgcgccccgatcgtcttctgctttacgcaagcgaacgctggcgccaaacggcagcgggccgtggctatcgcgaagggtaaacagcacgcggctgccgatgtgggtctgatagtttgcctgcaccaccgccccgccgccggggatcaccgtctgcccttcaagttcaacatcggcatcgtcggccagcgattcggtatcgagcgtaatgatgtttttgcgatacgccgtcagcgagggcaccaccgcatagccccgccagtcggtatgcacgttgctgccgttctgaattgccacgtcggcggctcccggcgcgcgtacgatggcaaagctttcgccgacggtctgacccagcgtcacgccatgaggatgggcgacgatggaccccgatgcgccccaggtcagctgatggcttgcgctatcgcggcgatagccgagctgcgcggttccatagccgccgtggtaatcgagcgatgcgctgctgttgctgccctggccgccgttaacgtagccctgctgaagggagtagtagagattgggattgcgcggaagcgaaccgtacagcgacgcctgctgcgaggtgcgtccgttattgtcggaggtggtgctgtagctaaccgcgctctcggacagcgggccgccaagcggaatgctcaggttcaaggaccacgagcgatcgtttttttggcgatcggatgactgggtgtagtaataacccacgccccacgaaacgcctcgccaggcgctgtaaaaaccgagatggatcgtttcatcgcggctctggcggtgccagtactcctgcgaccaggcggaaatcgccaggctgctcatgccgccaaatgcctgagaaagggagacctcttcgcggctgcgcttgttatccagcaggccattgcggctctcaagcgcgctggcttcgctgaagtcgtaataacctcctgaggagtagcgatagctggcgaggctaaatgaggtgccggtgccggcaaaatccttctggtactgcacccgtaccgaatggccggccgagcgctttcccgacggcgtcgtggtgttcgcccatgtcgcatcgcctccaagcgatccgagctcgccaaaaccgcgcccgacgccgagcgcccacgactggtaatcctgcgccagctggctaccgccgtagagcgtgaattcagccggtagcccataaaagagcataccctgcaaaaacgtcggcgagcgcgcctggctctgctccgaatggtagcgtccggcgctcaggctgaatttcacgcgtccttcccgcagcataaacgggacggctgaaaagggctgggtaaaggtccgcaccgaaccatcgctctcttttacctgcacctcgagatcgccgctttgcgccgttggatagaggtcgtttatcgcaaacgctcccggcgagacgaacgtttcatagataacgtagccatgctgggagatggtgactttggcgttgctgtgcgccattccgcggatcgtcggggcgaagccgcgctggctatccggcagcatttcatcatcggacatcagctgaacgccgcgaaactgcacgctgtcgaaaacgtcgccggtcgtaaaggtatcgcccatccgcagcaggcttttgagtgacttcaggtcgcgctgtagccaggtactctgtgaattccagcgccgggtccggtcatactccatcgacgagacgttacgcaggcgccaggcaccgaggttaaccccgctgcgtagattcaggtagctggagtggctgctgtcatccgtctgccgggtttgcgacccggtcaggttatagttaacaaacgccgccgggataccatcatcccagcgtgccggatccacgtatccgcggctctgggcgttcatggccgcctggggaatacttaagttcagacgctgagtggcgaaatcaaaacggctgctggcatcggggatgtagcgctcgatgcgagtaaacgtttctccctcatgcagggtattaaacgccgggaaagcgctgacgttgacgccatattccgccagctgcgccggggttaactgcggccgcagttcgccgttgctgtcgacaaatgtcacctcgccctgggctatctcctggttattcacccaaatgctgaccgggtatgtcccgggctgctggccgcctgctttagcaaaatagtgtaaatcagcggtcttttgctgcggattggcaaattctaatgccgccggatcaaagtagtcctccgcccgcgcgataccgctttggtacagcagaaaaagcgccgtcggcaataataaaatcccgccggttggcgccgcgatcgccgaataaacgggagtcatatccgaagtgttatttttcacaatatcctgaccaggcgaagcaaattaattactgttgtgcgtaatccgtaataccaccgaagtcattaatggcgcgccatttaactaccccggaatgagtaatcggccacgctttatgatcaaaggggccaatcatgccgggttgcagaatatctgtaccgccaaccgaaataacaaaaaaggagacaaaatagggcgtcgggttttgggcaaccagcctggaaccttcaatgttaaacgtcagcttgcgccatgcatcgtcaggctcgcccgccagaccattcgggcgatagaagatcttaaactttgatttaatattgacctgaagcttgttcacttcatcttgtttcgttggagcaatacttttcacattgagccaaaaaacggattcgcgatcggtgggcagcgttccaccaatatagttaatacgcaatacgttctgctgttcaggatcgagacggaaaagcggcggcgtcacaataaaaggcacccggcttttattgttttccgcatagttttctacccacgattgcaccagataaggtgaatgagtatcagcgttggtaaccgatattgcggcttcacgtttcccttcctgataaacaacacgggttcctcccatgacaataccggcctgtgccgcagttgatagcaataaaaaggctatcgcggcgatcgttcgtttcataatgactaccgtccgggaataataaaagcgggtatcactgcctgaagctgataaataatctgcattaattatgccgaccctatttcagccgggcggcggctggcggcttacccggcgtgggaagccatgaataaccgcagctttacccgcttccagggtattagttgtaaaccatattgaagttggccgtaccgttggcagaaccggcggaaaccgcgctggttgagacatagtcagcaaagaattccaaatcggcggtacccgttgccgcgccgctcgcgccagcggtaacgctgtggccgcgtgagacggcgccgagatcaaccggcgtcgacttatcatcttcatacagctttatcgctaccccacttgcggtaccgtttatcgccagcagatcgctattgttggtatcgcgggtaccgtcaaacagcaccgagacggtggtaacggtagaaggacaatctttcactttgatatggaaggcggttttggtcgtttcagaacctgcgccggtaaaatagctgctcgcccatttccccagatcgacgctctgatttgcgctggtgctatcaacattacaggaggaatcggtaatcgatccggtaaattctacctgcccacccgtcccctgcgtgcccgcattagaaccggggttaacggtcattgccgatctggcgggttgtgaaggcgaggataatgcgctagcggacaccagagcaccgacaaacattgccataatacgaaattgcgttttcattattcatctcatctctaacttatattttcgacagattgcgcgcgagggattaagccccgggcaaatctgcgtgcagatcctccatgttaataatattcgcgttccgtccgcaggacatcaggcagcaaaaataagctgcttaattggctattttgataaaaagaagttcttcggcgaaattgataaaccctttattaaggtaacaaataaatactatccctaccgattacaaatcgcaatattttgttatgttaatgaaatgctgttttattttacatataaagataatattaaaaacattatgcgcattgttaattaatgcaaccaaaaatcacgatacaataacatcaaaaagcaacatcaggcggcgtaatttaacaaccacccctaatttcaccgcgatttttcggcaataattctgtgagcggactgggtttttatagaatattaggataaatcttagactggcttttatcttattttcgttatcgaataaacaataatcacgcgagtcattataagcaggagatattgatgacaagtgtatgtcatctgaaagccggagaggaaagatgaataacaatactttctttgtggaataataaacccgcaatcgatgctgaagattgcgggttatcctaaaataaatagctgacagggacgatcagaacaggcccagcggcgcggtaccgtagctcaccagcaggttcttcgtctgctgataggcattgagcgccatcttatgggtttcgcgccctacgccggactgtttgtagccgccgaacgcggcgtgcgcagggtagatgtgatagcagttggtccacacccgaccggccttaatgccgcgccccatgcgataagccaggttggtatcccgcgtccacaccccggccccaaggccaaactgggtttggtttgcaatagccagcgcctcggcttcatctttaaaggtggtgacgccgataaccgggccaaagatctcctcctggaagctgcgcatatcgttgcgaccctgaatcagcgtcggctgaatatagaaaccgttatccagttcggcagagatgctggcgcgttcgccgccggtcaggatctttccgccttcatcgcgagcgatcttaatataggaaaggatcttatcgaactgctgacgcgacgcctgcgcgccgatcatcgtatcggtatcaaaggggtcgccgcggcgaatttgcgccaccttctccatgacccgcgccataaagggctcgtaaatagactcctgaatcagcgcgcgggacgggcaggtgcagacctcaccctgattaaagaagcccagaaccaggccttcaaccgccttctcgatatactcttcttctccttccatcacgtcggcaaagtagatgttcggcgatttaccgcccagctcaacggtacaggggataatgttttccgccgcgcaggccatgatatggcggcctaccggcgttgagccggtaaaggcgattttggcgatgcgtttactggttgccagcgcttcacccgcctctttgccaaatccctgaaccacgttaaggacgcccgccgggaacagatcgccaataatctccagcagcaatgtaatgctgagcggcgtctgctctgccggtttcagcaccacgcagttgcccgcagccagcgccggagcgagcttccaggcggccatcagcagcgggaagttccacggaataatttgtccgaccacgccgagaggctcatggaagtgataagccaccgtcgtttcatcaatctccgccgtgcttccctcctgcgcgcgcaggcagccggcgaaatagcggaagtgatcgaccgccagcggcaggtcggcgttgagggtttcgcggatcggcttaccgttatcccagctctccgctaccgccagatattccaggttggcctcaatacggtcggcaacctgcagcagcagattagcgcggtgctgagccgacgttttgccccaggcgtcggcggcccggtgcgccgcatcaagggcgaagtcgatatctttggcatcagaacgcggaaactgcccgatgttgctaccgtcgaccggggaggtattcataaagaattctccaccgatgggttcaacaaatttaccgtcaataaagttaccgtaggctgacttcagtgaaaccaaagcgcccggtgtgccaggatgagcataacgcatcgcgaatctccttcatgtagggttgagggcagcggcatattagttttgtacggcggctcgctgcgtctctcgtctattgcaggggttatgccattttttatattttaaaaaagaaattaattttcaataaattagataggtcacgtcactttctgtcgcacagaatctctcttatgtgtcgcaaatcgcaacacaacgaaaaccatatagctacaatattgcaacacaaattaaacgacgaggtgtcccgtgccaggaaatccgtttgccctgacgccagagatcgaaacgaacccgctgctcagcgactcctggtgccgtagccagcgctatggcctcgaccccgccacggatgacttccctcgcctgcacgccagcgaactggccgacaggctcgccagacacagccgcctgcaaacgctggcccagccggtcgttaatgagctatcccgcaaagtcaacgctctgcaatccgtcgtggttctctctgacgccagcggtctggttttgcaaacctttggcgatacgcacgccatgcagaaagcgcagcgcttcgctttagcgccgggcaacctgtggagcgaaagcggacgcggaaccaacgccattggcaccgcgctggcaattgacgacagctgcgaaatcgatggccgccagcattttctgaccagtaaccagggtctttattgcgccgccgtgccgctgcaaagtcccgatggcaaaatagccggggtgctggatatctccggcccggcccggtacccgcacgcccgcacgctggcgtgggtaaaaggcgccgcgaagcagatagaatatctgtgggttaaacagagtctgcatccgcaacagtggctgatgagcctgcatcctcagctggaaaagctcgacggcgtcgacgaatgtctgctggtctttaccgacaatgtgctgatggcggctaaccggctggcgatgcgcgagttctcacttaacgcagatcggttcggccacctcacgttccagcagctttttccgcagctgcggcaaaccgccgtcagcgtaccgctgccgctcatcgccggagatcgaaactactattaccgtctacgcgctcccgtgaccgctggcgtggcggtgaccgcgcgccccaccctcgagctgcctttctccagccagcgcgaaggcgaaaagctgctgcgcctgcttaacgccgggattgggttgtgtatcgaaggcgaaaccggctgcggcaaagagtacgtcagccgtaccctgcatcggcacagccgctggagcggcggcaaattcgtcgccatcaactgcgccgcgctgccggaatcactgattgaatccgagctgtttggctaccagcccggggcgtttaccggcgcaaacaaaaacggctacatcggcaaaattcgcgaagccgacggcggcgtactatttcttgatgagattggcgatatgccgttaacgcttcagacccggctgctgaggatcttacaggagaaagaggtcacgccgcttggcgccagccagagctcgccggttaatttcgcggtgatttgcgccacccaccgcaatctggcgcagcgcgtcgcggaaggaaccttccgcgaagacctgctctaccgcctgcgtgagtttgctttaacgctgccgcccctgcgcgaatggcctgaactgtccgggtttatccaacgattgtggcacgagctgggcggagaaaaacgtcgcatcgcgctggccccggaagttgtgcaacacctgacgtctcatccctggccgggcaacgtccgccagctgcaaagtgtgttgagggtactgctggccctcgccgaagagggtgaaacgctggggatagatgatttgccccaggagtatcgaagcccgcccgccgcccgcccgctgcgcgggcttcagcagcacgatgcgcagctgattgccgacacgctggcaagctataacggcaacatcagtaaggccgcgcaggctttaggcgtcgcgcgcagcacgctgtatcgccgtgcggcccgtcgcggaagccatagcgcatagccttctgattcgctcagggcgtgaagcgcggcggccataataccgccattagtattaccaggtttcagccgcgctattttgtcacagcggcatccattgctggcgtaatacgcttttttattttagactttactaaatttagaaaaggctaaaataaatgaatacacccgaacagctacaggccagcgccggcgaagccgccgcgctgctgaaagccatgagccatcccagcaggctattgattctgtgcatgctatgcgatgcgccgggcaccagcgccggcgaactggcgcggataaccgggctgagcccctccgcaacttcccagcatctggcgcggatgcgtgatgaaggcctgatcggctgcgaacgtcaggcgcagcgcattcactacttcattacccggccagcggttcagcaaatcgtcgccgcgctgaagtcaatctattgtccttaaggagcctttatgcctattgctactctttcgcctgccgaagcccaggcgctcgtcgcccggggcggccggctgatcgatatccgcgatgccgatgaatacgcccgcgagcatattcccggagcggagctcgtgccgctggcgacgctgacgaatggcgcagcgctgcacgccagtcccgaagagacgattatttttcactgtcaggcgggatcgcgcacccaaaataacgcggcccgtctggcgcaggccgccgcaccggcgcaggtaaagctgctggctggcggaattcaggcgtggaaagcggccggtctgccggtgaaagaggataaatcacagccgctgccgcttatgcgtcaggtacagatcgtcgccggcgccctgattttgcttggcgtcgctttaggttatgctttcagcagcggcttttttctgcttagcgccttcgtcggcgccggcttaacctttgccggtattaccgggttttgcggtatggcgcgtcttttggctttgatgccctggaaccgtcgctagcctctacctcttttgagagactgttggtaacgcttttgctgagctatggttatgtcagcgaaaagattcatcagcacacaggagaagcagtatgttttcagtcggtgacctggtacaaccgcgcgcgggtgggccaaaacttaaagtcgttgaagtccaggacgatcgcattattgccgttcaggcaagcaacgagcagggtgagaaatatacgctgaaggccgccgatgtgacggcttataaagaagacggcgattttggcgtgtgctgattaagccggctaacgataacggtgggtctccccaccgttttcaatattagatcaggaagctatcgagggattttccctcagccaccgctttagccagtggcttcggcatacgtccctgcccggtccaggttttctcggcgccggtatggtcggtaaaacgatatttagccggacgcggctggcgctttttgctccctttcggggaagcgctattgtagcccgctaattgttcaggggtaatgccgtcagccatcattaattccagccaggtatttattttttcctgatgttctgcgcgcagcgcctgagccgcctgctcctcagcgcgtttttcttcagtgacggtccttagctttgccagcatatcttcaagcacgtcaatggagaattcacgggacatggcgcgaagtgaacggatattattcaatttctctaatagtaatgacatataattcaaaaaattcccaaatagcaaatgaaacaaagattacggcgctagtttaattgatatgataatgtatttccagcctttcactaattcctgatatagcaccagaaatgtttagcaattaataaggcgaacaaatcgataaaagcgaaattatcaacactgaataaattcttttgcaaataatactattcgccaggcaacgtctttatcttattacctgtatgctcagcaggttatccgtatatttacggttgcgcctcgcagggcgctacgggcgtttatagaatagtcatgcaaaaaatccgaatgtccacccagcagacaaatcagcatataatgctgccattcctcttttatacgtgtaaaaaacgccaaaagtgacacaactcacaccgctacgcgattctgtcgcgaaatcccccctcacaacccggattggctctcatctatatgacgcatttattttacaaccaattgaaaaacaataaaaaaatcagtaaagagaacaaaagtagcgtaacgaacaaaaaatagcctgacgcagagtattttatcgaccaaaagcctttaaataaaaatttatagctagttgcctcttttaatgcagagatataatctacgcacatcaaaacaggcacccaaaaacgctaaataaccgcgaatcttttggcattatcgacttcattttcgaggagcataccaatgttctctgcgcagtcccgcttgcgtcatgcggtagcagacacctttgcgatggtggtgtactgcaccgttgtgaacatgatgatcgaaatttttctctccggaatgactttccagcagtcgttatcttcgagactggtggcgattccggtgaacattattattgccgtgccttacggtttttatcgagatttcgcgatgcgccaggcgcgccgcattagcgcatccggctggatgaagaatattgcggatgtggtggcctatgtgacgttccagtcgccggtatacgtcgcgattctgctggttgtcggcgccgactggcatcagatcgccgcggcggtaagttccaacatcgtggtatcgatgatgatgggcgcagcgtacggctatttcctcgactactgccgccgcctgtttcgcgtcagcccctatcagcaggccaaagcctgagttgatacaaaaaagcgactggttcagccagccgctttttgtcagctatactgcgtttcgccaaacaggccactcagaaaacgctcaagcgccatgcgcgaactgaacccgtgtggaataccataatgctgctgagcatcgcccgctaaatagagcgggaactgctcgtagtgatcgcaggttttaatatccgacgcgggctccgcaagcgttgtgctgcgctcttttaaagccggatgaataattaacgcggtacgccccatacgagcttcacggttcacataaacataattatcgccacggcgatagccgtacgctttttgcgtcacaacatccatggtgaagccggctttttcaagaacacgcgccacctcatcgggtcttaaatacatactcattcctcattatcttttaccgcacgttaaccttaccttattcattaaaggcaacgctttcggaatattccataaagggctatttacagcataattcaaaatcttgtcctacacttatagactcaatggaataaagggagaaaccaatggccaaccgagcaaaccgcaacaacgtagaagagagcgctgaagatatccataatgatgtcagccaattagcggatacgctggaagaggtgctgaaatcatggggcagcgacgccaaggacgaagcggaggccgcgcgtaaaaaagcgcaggcgctgctgaaagagacccgcgcgcggcttaacggcaataaccgcgttcagcaggcggcgtgcgatgccatgggctgcgctgacagctatgtgcgcgataaaccgtggcaaagcgtcggcgccgcagctgccgttggggtatttattggcgtattgctgaatttacgtcgataataaaacagccagacccatgaagataacaaatacgcgtctacccctgccctgcaggggtttttgttatctctgcgggtaaagcgcgacataaagcttacgcacagcctggttcgccatttcttccgacgtcaggttggtgaagctcattatcagccccccttctccccgagcctccatccgccagtcgctcagcgcctgtacggccagaccagcccgtctggcgcgctgcgccagaggccgatcgtctccggcgaccctgaccaccatctggatcccgcccgcctgaggcacgacggtgaatccctgcgcccgcagcgccgactcaagccacagtcggcgctgggcatagctggcgcgcattttcttcagatgccgccagaaatggccttcgcgaataaaatccgccagcgtctgctgccacagcgtcggcacgctacagcacatcagcgcggcccgttcacgaaactgcgccaccagcggctcaggcaccaccagccaggcggcgcgtaatgccgggaacaaagacttgctgaacgccccggcatagatgacccgctgcggggcgtcgaggcttttcagcggcggcagcggcttaccgtgatagcggaattcgctatcgtaatcatcttcgataatccacgcgttattctgcgccgcccatagcaggagctgtctgcgcctggccagcgatagcgccacgccgagcgggctttgatgagccggggtcagcagcgcgaaatgggcactcgggtaatgccgctgcgcccagggaatatccatcccgtcgtcgtcgaccggaacgggattgatcgccaccccctcatcgttcactaccggccggatcagcggaaatcccggatcttccatccacatttgctggccaggccgcgccagcgtgcgcaaaataaggcgcatcgaggccgcgtagctaccggtgatcaagacctgctcaggccgacactcaatgctgcgcgacagacgcaaataatcgacgatcgcccggcgaagcgtcggttcaccgcagggatcgcctggcgcgaggtcaaaacgcgtttgcgtacgcagacgccgccccatcacgcgcgcccacaggccgcgtggaaacagatccagcgcgggcagccccagctgaaacggcagcggcgccgcggtttcatcgcccgcgatgggctgaacgggcgcgttttgctgcggcagcagccgatcgctgacaaaggtccctgcctgtccgcgccgctccagccatccctgcgccaccagatctccccacgtgttctcaatcgtcgcccgcgacacgccaagctcctgagcatagacccgacttgcaggcagcctgctgcccggagccagctcgccgcgctcaatcgcctgcttaagttgtcgggcaatgcgctggtagtgcggaatttttttaccgtccatcatggtctgcttttttcatcgcaatatggctatcttatgcagtccattatagtgctattttcctcgcgtcttaatgaggagagtaaaatgaacacactacgtcagccgtacaatgaactgagcccggaagtctataacgccctggttcaggccaaaattgcgctggaaaaaagcgagctggatggcgcgctgatcgagctggtgtatttgcgggtatcgcaaatcaacggctgcgccttctgcctggagatgcacagcaaagccctgcgtaaatccggcgtcgcgcaaaacaagctggacgcgctggcaggctggcgggtgagcgcccatttcagcgatgcggaacgcgccgcgctggcgtgggcggaatcggtgacccatatcgccgaaagccatgcggaagacgccgtttatcagccgctactggaccatttcagcgcccgccagatcagcgatctgaccttcgccatcagcctgatgaacgcctttaatcgtctggcggtgagtatgcgcctgtaatttcacggcaagaaatcccgccccccgccggatcctcccgcgggggctaacctttacaaaaaccatatatattgagttgttgaacttttaaataactacatctagtatttccttcaacgataacccatagcacgcgacgtcaatttttacgtcgtactgttatcttaaatggaaatacgaatcatgcgcattactatttacactaaaaacgactgcgtgcaatgccatgccactaaacgggccatggaaacccgcgggtttgaattcgatatgatcaacatcgaccaccaccctgaagccgtcgatatgctgcgcgagcagggtttccgtcagcttccggtagtgattgccggagagacccgctggtccggcttccgtcccgatatgatcaatcgcctgcgcccgacagcgtcagcggccagcgtatgagcctgatcgtctacttctccagcagttccgaaaatacgcaccggttcgtccagcgtctggagctgcccgccgtgcgtataccgcttaacgaacgcgagcgcatccaggtagacgaaccctacattcttatcgtccccagctatggcggcggcggcacggcgggcgcggtcccccggcaggcgatccgtttcctcaacgatccgcataaccgccagcttattcgcggcgtcatcgccgcgggcaatcgtaattttggcgaggcctacggccgggcaggcgacgtcatcaagcagaaatgcggcgtaccgtatctctatcgctttgagctgatgggcaccccgcaagatgtcgacaacgtgcgtaaaggagtaagcgaattttggcaacgacaaccgcagaacgtataaccaccgaggcgccggatttccacgccctcaacgcgatgctgaatctctacgacagcaacggccgcatcccgtttgacaaagaccatcaggcggtagcggcgtttatggccaaccacgttgagccgaataccgtgccctttaccagccaggacgacaagctgacgtggctggtcgccgaaggctattacgacgccagggtgctggcccgctacgatcgctcgtttattcttgcgctgttcgcgtacgctcagggctacggttttcgcttccagacgtttctcggcgcatggaagttctataccagctacgcgctgaaaaccttcgatggtaagcgctaccttgaagactttgccgaccgcacctgcatggtggccctggccctggcgcagggtaacgaggcgctggcccggcagctaaccgatgagatcctctccggacgttttcagcccgccacgccgacgttcctcaacgcgggtaaacagcagcgcggcgagctggtctcctgctttctgctgcgcatcgaagacaatatggaatccattggccgggcggtgaactcggcgctgcagctatccaagcgcggcggcggcgtggcgtttctgctctccaatcttcgcgaagccggggcgccaatcaagcgtatcgagaatcagtcctccggcgtggtgccggtgatgaaaatgctggaagacgccttctcctacgccaaccagctcggcgcgcgccagggggccggcgcggtctatctgcacgcccatcatcccgatatcctgcgtttccttgataccaaacgcgagaacgccgatgaaaaaatccgcattaaaacgctctcgctcggggtggtgattccggatatcacctttcagctagcgaaagaagatgcgcagatggcgctgttctcgccctacgacgtcgagcgcctgtacggtaaaccgttcggcgatatcgcggtaagcgaaatgtatgcacaactggtggccgacgcgcgggtcagcaagcgctggatccgcgcccgcgatctgttccagcggctggcggaaattcagtttgaatccggctatccgtacatcatgtttgaagacacggttaatcgcgcgaacccgattgccgggcgcatcaatatgagcaacctgtgctcggagatcctgcaggttaacgcgccttctacctttgacgaaaacctggattacgccagcatcggccaggatatctcctgtaacctcggctcgctgaatatcgcccataccatggactctcctgatttcgcccgcacggtcgaggtcgcggtgcgcggtctgaccgcggtgtccgaaatgagcgatatccgttcggtaccgtcggtcgcggcgggcaatgccgcttcgcacgccatcggcctcgggcagatgaatctgcacggctatctggcgcgcgaaggtattgcctacggcagcgaagcggggctggatttcaccaatttctatttctataccatcacctggcacgcgctgcgtacctcgatgctgatagcgcgggaaaaaggcacgcgttttgccggattcgagcagtcgcggtacgccagcggtgattatttccgcccctacctggaaggcgactggcagccgaaaacggcgaaagtccgcgcgctgtttgcccgtgccggtattgccctgcccgaccgcgatatgtggcggcagctgcgcgatgacgtgatgcgctacggcatttataaccgcaacctgcaggcggtgccgccgacgggctctatttcgtacatcaaccacgcgacctccagcatccatccgatcgtgtcgaagatagagatccgcaaggaggggaaaaccgggcgcgtttactatccggcgccgtttatgaccaacgacaacctggcgctgtatcaggacgcttacgaaatcggcccgcagaagatcatcgacacctacgccgaggcgacgcgccatgtcgatcaggggctgtcgctgaccctgttcttccccgataccgccaccacgcgcgatatcaataaagcgcaaatctacgcgtggaagaaaggcatcaaaacgctctattacatccgtctgcgccagctggcgctggaaggtaccgaaatcgaaggctgcgtgtcctgcgcgctgtaaggagaacaggatgacccatttatcgcgcatcagcgccatcaactggaacaaaattgaagatgataaggatctggaggtctggaatcggctgaccagcaacttctggctgccggagaaggtgccgctgtctaacgatatccccgcctggcaaacgctcaccccggcggaacagcagctaacgattcgcgtcttcaccggcctgacgctgctcgataccatccagaataccgttggcgccccggcgctgatggccgacgccctcaccccgcatgaggaagcggtgctgtcgaacgtcagctttatggaggcggtgcacgcccgctcctacagctccattttctcgacgctctgccagaccaaagacgtcgatgccgcctatgcctggagcgaacaaaacgcgccgctgcagcgcaaagcgcagctgatgctggagtactatcaggcagatgaaccgctgaagaaaaaaatcgccagcgtctttctcgaatcgttcctcttctactccggcttctggctgccgatgtacttctctagccgggggaagatgaccaacaccgccgatctgattcgcctgatcatccgcgatgaagcggtacacggttattacattggctacaaattccagaaagggctggaaatagtcagcgccgagaagcgcgaggagatgaaaaacttcgccctcgacctgttgatggatctgtatgacaacgaactggcctacacccgcgaactgtacgccgatagcggctggattgaggaggtcaacgcctttctctgctacaacgccaataaggcgctgatgaacctcggctacgaggcgctgttcccggcggaaatggccgccgtcaatccggcgatcctcgccgcgctttcgccgaatgccgacgaaaaccacgacttcttttccggttcaggttcatcgtatgtgatgggaaaagcggaagaaaccgtcgacggcgattgggacttttagccttactttcaccaggaatatatcagcatatttcctggtgatttatttcacattatttgttttcgcctcactcaatatctttcggtcatcaccgtgtcatattcaacagcatgccctcgattttcgcctgaattaacgcaacataactaaaaaatatcgaccacaagtcattcgcgctcagcccttatatcacgggggatgcaccggaattctcccttgcacatttccctggcaacgccacataaagggttgtcacagattctcagtatgttagggtgtaaaaaagcaattatcatcaccgggtaccgtatcgatattaataaataacaggaaacactctattgcatggcaattaaattagaaatcaagaatctctataagatatttggcgagcacccgcagcgggctttcaaatatatcgataaaggactatcgaaagaacaaatactggaaaagacggggttatcgcttggcgtaaagaacgccagtctgaccattgaagaaggcgagatattcgtcatcatggggctctccggatcggggaaatctaccatggttcgccttctcaatcgcctgattgaacccacccgtggccaggtcctgatcgacggcgtcgatatcgctaaaatctctgacgccgagctccgcgaggtgcgcagaaaaaaaattgcgatggtttttcaatcctttgcgcttatgccgcatatgaccgtgctcgacaacgccgctttcggcatggagctggccggcgtgccgactcaggaacgccaggagaaagcgctggaggcgctgcgccaggtcggcctggaaaactatgctcatgcatacccggacgaactctccggcggcatgcgccagcgcgttggtctcgcccgcgcgctggcgattaatcccgatattctgttaatggatgaagccttctccgcgctcgacccgttaattcgtaccgagatgcaggatgagctcactaaattacaggccagacatcagcgtaccgtggtctttatttcccacgatcttgatgaagccatgcgtattggcgatcggattgccattatgcaaaatggtgaagtggttcaggtcggcacgccggatgaaatactcaataatccggccaatgattatgtccgaaccttcttccgcggcgtcgatattagccaggtgttcagcgccaaagatattgcccgccgtagcccggtggggctgattcgcaaaacgcccggctttggcccgcgttccgcgctgaaattgctgcaggatgaagaccgcgaatatggctacgtcattgaacgcgggaataagtttgttggcattgtctccattgattccctgaaagccgcgctaagcgaaggtcagggaattgatgcggcgttaatcgactcaccgcaggcggtggatgcgcaaacgccgctcagcgagctgctctctcacgtcggccatgcaccgtgcgcggtgccggttgtcgacgaggggcaccagtacatcggcatcatttccaaacggatgctgctgcaggctttagatcgcgagggggcaaacaatggctgatcaatctaacccgtgggacaccgcaccggcggcggatagcgcagcgcaatccgccgatgcctggggcacctctacgccggcgccgaccgatggcggaggtgccgactggctgagcagcgcgcccgcgccgcagccggaacacttcaatattatggacccgttccataaaacgctgatcccactcgacagctgggtcacgcacggtatcgactgggtcgtgatgcattttcgtccggtattccagggaatacgcgtaccggtggattacatcctgagcgccttccagcaactgctgctgggtatgccggcgccggtggcgattattattttctcgctgattgcctggcagatttccagcgtcggcatgggcgcggcgacgctgatttcgctgatcgctatcggcgctatcggcgcctggtcgcaggcgatggtgaccctggcgctggtgctgaccgcgctgctgttttgtatgctgatcggcctgccgcttgggatatggctggcgcggagcccgcgggcggcgaaaattatccgtccgctgctcgacgcgatgcagaccacgccggcgtttgtctatctggtgcccattgtgatgctgttcggtatcggcaacgttccgggcgtggtggtcaccattatcttcgccctgccgccgattgttcgtctgaccattctggggattaaccaggtgccggcggatctgattgaagcgtcgcgctccttcggcgccagcccgcgtcagctgttgtttaaggttcagctaccgctggccatgccgacgattatggccggggtcaaccagacgctgatgctggccctgtcgatggtggtcatcgcctcaatgattgccgttggcggtctcggccagatggtactgcgcggcatcggtcgccttgatatgggcctggccaccgttggcggcgtcgggattgttatcctcgccattattcttgaccgtctgactcaggccgtaggacgggactcacgcagccgcggcaaccgccgctggtatgcaaccggcccactggggctgataactcgccctttctgtaaataagagcccatccccccgacagccggggggatagacttcccttctgataaataaaaggaacaacgatgcgacatacagcgatccttgccacagcgttaaccgccctcatttccaccaccgccttcgcggcggatctgcctggcaaaggcattaccgttaagccgattcagagcaccatttcggaagagaccttccagaccctgctggtcagccgcgcgctggagaaactcggttataccgtcgataagccgagcgaagtggattacaacgttggctatacttcgctcgcctccggcgacgccacttttaccgccgtcaactggcagcccctgcacgacgatatgtacgctgccgccggcggggataaaaagttctaccgcgaaggcgtgtttgtgaacggtgcggcgcagggctatctgattgataagaaaacggccgagcagtaccacattaaatctatcgatcagttaaaagacccgaaaatcgccaaactgtttgacaccaacggcgacggtaaagccgacctgaccggctgcaccccgggctggggctgtgaagcggtgatcaaccatcagcttgatgcctatggcctgaataataccgtcacccacaatcagggtaactatgccgccatgatggccgacaccattgcccgttataaagagggcaagccggtcatctactacacctggacaccttactgggtcagcgatgtgctgaagccgggtaaagacgtcgtctggctgcaggtgccattctcctccctgccgggtgtgcaaaaaaacatcgacacgaagctctctaatggcgccaactacggcttcccggtcagcaccatgcatatcgtcgccaataaggcctgggccgagaaaaacccggcggcggcgaagctgtttagcatcatgaagctgccgattgccgacatcaacgccgagaatgccatgatgcacgagggacatggttcagaagcagatatccaaggccacgtcgacggctggatcaaagcccaccagcagcagtttgacggctgggtgaacgaagcgctggccgcgcagaaatagtctcccactttatagccaattcccggcggcgatgctacgcatctgcccgggctacaaaagccgtagcccgggcaaggcgctttgcgccgcccccggggaagaccgcatcctgcacaacacgacatctcctgttctaaatgatggattgatatgcaaataaactgcataactttagccatcaacgttttcgttactgttaagccgcaccgctctctgctaaggtaaatccacctgtttaatcatgtgattttcacgtgagttatcaataagcaattcctatggaaaatcctgacgcattgacgcactctcctcccgctgacgcggccacgctggctgaaggcctgaaagacagcctgccgatcgtcatcagctatatccccgtggccttcgccttcggcctcaacgccactaagctcggcttcactccgctggaaagtctgttcttctcctgcattatttacgcgggcgccagccagttcgtgatcaccgcgatgctggcggcgggaagctcgctgtgggtcgccgcgctcaccgtcatggcgatggacgttcgccacgttctctacggcccttccctgcgcagccgcatccagcgcgcgctgagcaagaaaaaaaccgcggtatgggcattcggcctgaccgatgaggtctttgccgccgccactgctaaactggtacgcgacaatcgacgctggagcgaaaactggatgatcggtatcgctttgatgtcctgggcgtcatgggtcttcggtacgctgatcggcgcttattcgggcagcggcctgctgaccgactttccggcggtggaagcggcgctgggctttatgcttcccgcgctgtttatgagctttttgctggcttctttccagcgcaagcagtcgcttagcgtaaccgccgcgctggcaggggcgctgggggggatcatcctgttttccattcccgccgccatccttgccgggatcgtctgcggctgtctgaccgcgctggtgcaggccagcattgaggggatgcccgatgaacagtgatgttttaattatcggcctcgtggtcggctgcgtaaattatctgttccgctatctgccgctgcgcctgcgtgccgggaacgcgcgtccgacgcgtcgcgggccggtcagcgtgctgctggacaccatcggcatcgcctctatttgcgcgctgctggtggtctccagcgtaccggaaattctccacgatgcccgccgcctgctgcccacgctggctggcttcgccgtgctgggcctggctttctggaaaacgcgcagcattattttgcctacactattaagcgccctaacctacggtgttgtctggaaaatcggcacatggctataagcttaaagtatcaatttctgtcaataattcatttgatttatttgtcacaatagttattatatcgactgtaattaatgaggtcataaccaaaatggatagttcgtttactcccattgagcaaatgctcaagttccgcgccagccgtcacgaagactttccttttcaggagattctgctcacccgtctttgcatgcatatgcagggaaaattgctggaaaaccgcaacaagatgctgaaagcgcaagggattaacgagacattgtttatggcgctgatcacgctcgagtctcaggaaaaccacagcattcagccttccgagctgagctgcgcgctgggctcttcgcgtaccaacgccacgcgcattgccgacgagctggaaaaacgcggctggattgagcgccgcgaaagcgataacgatcgtcgctgcctgcatttacagcttaccgaaaaggggcatcagttcctgcgcgaagtgttacccccgcagcacaactgcctgcatcagctctggtcttctttaagcaccagcgaaaaagatcagctcgagcacatcacccgtaagctgcttggtcgccttgaccaaatggaagaggatggcgtgcttgcggagtctctgcgctaagcgcggaaccaaccgctcaacaatttttctggattgacaaggaaaacggacaggccagcagatcttctgctggcctttctgataaacaggtcggctcagccgatgtgaaataataagatcgtggagaataacatgagcgcaaatgcggagagccaaaccccgcagcaaccgggcagcaaaaaagggaaacgtaaaggcgccctcctgctgctgaccttgctctttattattgttgccgtggcatacgggatttattggtttttggtactgcgtcacttcgaagagaccgacgacgcgtacgtggcagggaatcaggtacaaattatggcgcaggtgtccggcagcgtgacgaaagtctgggccgacaacaccgactacgtgcaaaaaggcgatccgctggtcaccctcgaccagaccgatgcccagcaggcgtttgaaaaagcgcaaacccagctggccgccagcgtacgtcaaacgcgccagcagatgatcaacagcaagcagctgcaggccagcatcgacgtgaaaaaaaccgcgctttcccaggcgcagaccgaccttaaccgtcgtattccgctgggggccgccaacctgattggccgcgaagagctgcagcacgcgcgcgacacggttgccagcgcgcaggccgaactggacgtggcgattcagcaatacaacgccaatcaggcgatcgttctgggcacgaagctggaacagcagcctgcggtactacaagcggccaccgaagtgcgtaacgcctggctggccctgcagcggacgaaaatcgtcagcccgattagcggctacgtttcgcgtcgctccgtacagcccggcgcgcaaatcaccaccaccaccccgctgatggccgtcgtgccagcgaccaacctgtggattgacgccaactttaaagaaacccagctggcgcacatgcgtatcggtcagccggccaccgtgatcagcgatatttacggtgacgatgtgaaatacaccggtaaagtggtcggcctcgatatgggcaccggtagcgccttctcgctgctgcccgcgcagaacgccaccggcaactggatcaaagtggttcagcgcctgccggtacgtatcgagctggatgaaaaacagctggcagagcacccgctgcgcatcggcctttcgaccctggttgaagtgaacaccaccgaccgcggcggcgagatgctggcaagccaggtacgcagctctccggtttacgaaagcaatgcccgcgaaatcggccttgagccggtcaataagctgataaacgacatcatccaggccaacgccggataattcggggtgagcgtaatgcaacagcaaaaaccgctggaaggcgcgcagctggtcattatgaccattgcgctgtcgctcgcgacctttatgcaggtgctggactccaccatcgccaacgtggccatccccaccatcgccggtaaccttggctcatcgttgagccaggggacctgggttatcacctcgtttggggtggcgaacgctatctccattccgattaccggctggctggcaaagcgcgtaggtgaagtgaagctgttcctctggtcgacggtggcgttcgccatcgcctcctgggcctgcggcatgtcaaacagcctgacgatgctaattttcttccgcgtgattcaggggatcgtcgccggtccgctgattccgctgtcgcaaagtctgctgctcagcaactatccgcccgccaagcgctctatcgccctggcgctgtggtcaatgacggtgatcgtcgcgccgatttgcggcccgattctcggcggctatatcagcgacaactaccactggggctggatcttctttatcaacgtgccgattggcatcgccgtggtggtcatgacgctacagaccctgcgcaaccgcgaaacccgcaccgagcagcggcggattgacggcgttggcctggcgctgctgattattggtatcggtagcctgcaggtgatgctcgaccggggtaaagagctggactggttcgcctcaaacgagatcatcatcctgaccattgtcgcggtggtggcgataagcttcctgatcgtctgggagctaaccgacgacaacccgatagtcgacctgtcgctctttaagtcgcgaaacttcaccatcggctgcctgtgtatcagcctcgcctatatgctctacttcggcgctatcgtgctgttgccgcagctactgcaggaggtatacggctataccgccacctgggccggtctggcctcggccccggtcggggtgatcccggtaatcctgtcgccgattatcggccgcttcgcgcataagctggatatgcgtcggctggtcaccttcagctttattatgtacgcggtctgtttctactggcgcgcgtggaccttcgaaccgggtatggacttcggcgcctcggcgtggccgcagtttatccagggcttcgcggtggcctgcttctttatgccgctgacgaccattacgctttccggcctgccgccggaacggctggcggcggcatcgagcctgtcgaacttcacgcgtaccctggcgggctccatcggcacctcgattaccaccactatgtggacgaaccgcgaggcgctgcaccatgctcagcttaccgaatcggtgacgccgtataatcccaacgcccagcagatgtacgatcagctgcagggattagggatgacgcaacagcaggcgtccggctggatagcgcagcagataaccaaccaggggctgataatctccgccaacgaaattttctggttctcggcggcaatatttatcctactgctcgggctggtgtggtttgccaggccgccgtttagcgccgggggcggcggcggcggcgcgcactaaggtttgacctgaagggatctgcggatcccttttttattgcccaacacgcaggttgtccggtttacgctagttgatgtccagttcgctggagatgccttttcgctctgtcgtgcacgatgaagatccgctaagaaggagaaaatcatgctgactcaacccggtgaaaaataccgtccctatccgccgattgccctgcccgaccgccgctggccggagcaaaaaatagcccgcgccccccgctggctctccaccgacctgcgcgacggcaaccaggcgctggccgagccgatggacagcgcgcgcaagctgcagttctgggacttgctgctggagtgcggatttaaagagatcgaggtggcatttccctcggcttcgcaaaccgatttcaactttgtgcgtcaactgattgaagaacggcgtatcccgcaggatgtgacgattcaggtgctgacccaggcgcgggaagatttaatcctcaggaccttcgaatcgctgcgcgatgcccaccgcgccaccgttcacctctataacgccaccgctccgctgttccgcgagctggtttttggaatgaacaaagcgcaggtggtcgagctggcgacccgcgccacccggcttatccgccagcagtgcgaacagcagccgcagacccgctggcaatacgagtattccccggaaaccttctgcttcaccgagccggaattcgcgctggagatttgcgaatcggtggcgcaaatctggcagccctgcgccgaacggccgatgattatcaatctgcccgcgacggtagaagtgagcacgcctaacgtttatgccgatcaaattgagtatttttgtcgtcacttctcgcgccgcgccgatgtgtgcatcagcgtccatccgcataacgaccggggaaccggcgtcgccagcgcggagctggcggtgatggccggcgccgaccgcgtcgaaggctgcctgttcggcaacggcgaacgcaccggtaacgtctgtctggtgacgctggcgatgaatctctacagccagggcgtcgatccccggctcagcttctccgaaatgaaccgggtggtcgaaattgtcgaaagctgcaaccagatcccggttcatccgcgccacccgtgggcgggaagcctcgcctataccgccttttccggctcgcatcaggatgcgatcaaaaaagggttcgatgcccgccggcccggcgaacgctgggaaatgccctatctgcccatcgacccgcaggatatcggctgtagctacgaagcggtgatccgcgtcaacagccagtccggcaaaagcggcagcgcgtggctgattgagcagaatcatggcctgaagctgccgcgcgcgctgcagcaggattttagcctgcacgttcagcacgaaaccgatacgcatggtaaagagatgacccagaacgcgctgtggcagctgtttcgcgcccgctacggacttctgccccagccgccgcttgcgctgctggattaccaaagcgatagccagcaggacggccagctttctctgcaggcgaccctgcgcatcgccggtgaaacgcgacgactgcagagccgcggcaacggcctgctgtccgccgccgccagcgggctgagcggcctgttaaagcaacacatcgtgattaaagattatcatgagcataccctcggcgaacgtagcgacagccgttcagtggcctatattcgctgcgtcttcccgaatggcgacagccgctggggggtaggaattgatagcgacgtggcgcgcgcctcgctgcaggcgttgtgcaatgcgatgagcgcaggccattacgccggcgagcggaagtagtcgctgggggccacgcctatcacccggcgaaacatggcgctaaaagcgctatggctgccgtagccgagatccagcgccacccgcaataccgaatgcccctgtgccaggcgaaccagcgcttccatcagcttcgcccggcgcacccactcgctccaggtgagcgaggtctgctgctgaaaatgacgattcagcgtgcgctcgctcatgctgctctccttcgccgcctcggcgctgctccagggttcgccgggcgcttctcttaccttctggcataaacggcgcagcgcttcgctttgcggctccggcaggccaaacggcagcactgccatgccgcgaatttcatcgaggatcagttcgtaaatgcgttcatcgcggctgtccggcgcgtaggattccgccagcgtcagcgatgcgacgatcagttcacgcagcagcggagtcacctggactatctggcaggatgaggggagatcggcccgggcaaggggatcgataaacagggttcgcgcggccgcgacgccggtcacccgtagggtatgcggcgtaccggcgggcagccagacgccacggcccggcggcacaacccaataaccctgcgcggtttccacccgcaccacgccgctgaggatatgcagcagctgggcgcaatcgtgctgatgccagggttcgctatcgccatgggcgtaatcatgggcaaaaggcaccagcgaacggtgttgaaaattgaaggttaaagtcgtcgacatcgcggcgtcagggagtagcggcccgacgcggttcgccgggccgtggcagaagcactagatgtgcagttcttgcagtttttctttcggcagcgccagctcatcgttgctgttgacgcggacatcgcgctcaataatatggcgagcgatttcctgagcttcctccagcgagtgcatggtgtaggttccgcactgataaacgttcagctccgggatctgattctgatctttcaccttcagcacgtcagccatcgccgctttccaggcatccgcgacgcgctgctcgtccggcgtaccgatcaggctcatatagaacccggtgcggcagcccatcggagagatgtcgataatttccacaccgttgccgttcaggtgatcgcgcatgaagccggcaaacaggtgctctagggtgtgaatgcctctttccggcatcacttcctggtttggcacgcagaatcgcagatcgaaaacggtgatttcatcgccgtgaggcgtgttcattttcttcgcgacacgcaccgcaggcgcttccattcgggtatggtcgactgtgaaactatctaacaacggcattcttcacctccgatagtgattttttttaaaataaaatgaactctttttgaggccgcgagtctgagtatatgaaagacgcgcatttattatcatcatcatccctgaatcagagatgaaagtttggccacagtgatgtggccgttttcttttttacggctcgtaaaactacgcgtgccgtgtcagcagcgcttcaaacggctcgctatccgccgcctccaccttcttctgacgctgtaccgatgcttcacgctcggcgacaaaatccgcttcgcttaaaatttccagcggctcttcgcgcagcatcgtccgataccgatcggccagttctctgccggtaccgccaatcccctcttcaagcatagaacgcagaatgcgcgccgagaaggttaattccggattatcgaagcaggcgaccagctcatcgcagacctgctgataggcctggcatccgtggatgctatccagcgtttgcgccacgcggcgtaaatcgcggaacagatctttgccgacctgagccagcgggaactgagcggtttcgcagccaatacccagcgtcaggcccggcttacggccttccagaatcacccgattccagttggtgcgcgtgcacagcagctcgtcgctgctcatctccggcgcatcggccagcacgcaccagaccataaacagatcgaggaaacgcacctgctgctcatcaacgccaatcggtgagaacggattgatatccagggagcgaacttcaatgtactcaataccgccgcgcagcagcgcgtcggaaggcgtttcgccgctgcgggtcacgcgtttcgggcgaatcggcgcgtacagctcgttttcgatctgcagcacgttgctgttgatttgcagacgcttgccgtctttctccagcccaatattttcatactcttcggaaggcgttttaatcgcccgcttcaatcctgccacatactcgtagagatcgttaaacgtaattccgagattgctttgcgatttattggtatagcccagatcgctcaggcgcaacgaggtcgcataaggcaggtagtacatgccgttgccggctttctcaaacggcagcgccgtcggtttgccctgcaggaacgacgagcagatcgccggagaggcgccgaacaggtatggaatcacccaaccaaaacggtaatagttgcgaatggagcggaaatagcccgctgaaatcgcctctttaccgctttcagcatcctcaacgccgcacttagcctgccagaaagccatcggcagcgagaagttatagtgcacgccggagatggtttgcatcagcgcgccgtagcgatttttcagcccttcgcgatacagcgttttcaggcggccgatattagaggaaccgtactgcgccagttcaatatcctggccgggcgcgatatagcaaggcatgctcagcggccacatccgctcgtcgccaatatggcgtgcggtatagcgatgaacatcgcgcatgagggtgagcatatgctggatatcgccatcaaccggcgtaataaattccagcaaagcttcggcaaaatcggtggtaatccatttatgagtcagcgctgaacccagtgcctgcggatgaccggtagtggccagcgtgccgtcagcgttgacgcgcagcgtttcgcgttcaagaccacgttgaataccctgcagcgcctgcggatttttttccagccaggccagcgcctgtgatacgtccgggatcaatttgacctcccgcctgtcgaaatcgtttgaattagcataattgtcatggttgaaccgtcagtccaattagtgccaccacgtcatgccctgaagcgttatcgccgcaatgacgatatagcgtaatgctttgccaaggcataaaaaaaagagcactggtccccaggaaatgcgcatccatcccgccagtaaacacagcaaatcgcctataacaggcgcccagcttaataatagcgtgaccgcgccgtaacgcctcagccagccggacgccttctcctgccagcgcgatgttttgcgcagcggaaacaggcgccccagaataacgttagttacccctccaaggctattaccgattattgctattaaaaccagtaaccacggctgactcccccccgccaggagcatggcgatcaacaccacttccgagttaccgggaagcagcgtggcgcttaaaaagctgctggcaaacagcgatatcagcgacagcgcgtcgctcacaacaatcgcacgtccacggcatccattccggcccgcttcgccgcctgcagaccgaagtccgcatcttcaaagaccacgcatttttccgccgcaacgcccatgcgctcagcgcagagtaagaaagtatcaggtgcgggtttatggttggcgacatgatcggcggcaaccaccgccgagaagtagtgacgcaggcccagatgggccagcagcgcttcagcaacggcgctctcgctgccggtaccgactgacatcggacgacgaccgtgccactctttaaccacttcaatcagcggcagaggacggacgctatcaagcagcatcgctttcaccgcgtccgtcttttcccgcgccagaaggtgaggatctaaatcagcctggtttaattcgataatggcctgagcaatccgccaggttggagagccgttaagcgcgaccatagcctgcatatcaaaacgcataccgtaacgtccgagaacctcgttccatgccttacgatgcgtcggctcggtatcgaggatcgtgccatccatatcaaaaatcagtcctgcataacgttcgtacatcgtcttctcaccaaccggttaaggaggtcttactgtaacgcaaaaggtcaggtttgtcgctgccagcggcagatgcgacaagggcgctcgaaggcgcccttgtcgatacagatgcaatctgatgcgtttatttgattcttaaatcgttctccaccacgcgaacgccctgcacttttcgcgtcacttctaccgcacgtttagcgctttcggcggatgagacaaagccgctcagctgtacacgacctttaaaggtctggacgctaatttccgaagacttaatctctttatcattgaagagcgcggttttgactttggtggtcacgacggtatcgtcaatgtacccaccagtactttcctttgtggacgaacctgcgcagcccgccagcgatacggcgaccagaagcgtcgcgcaaaacgcagatattgctttgaaccatttcatggatttctctccttgcacttatctcacccaaaatcagatcgatatacaggaataaattatagtggaaagagggagttgccaatgaaaaaagtgctgaagaataaggtgaatgattgcgcttaaggggttttgaggtaaggagagtggctggccgtgaaacaacagtgggttcgcccttcgggccgtttctgaagcaacgttatcctccctggcgctggcgattatctcgcagaccatggaacaatagcgtagctgctatctcggagaagatggtgcatccgggaggatgactcactgggttcgcccttcgggccgttgctgaagcaacgttatcctccctggtgcttgcggctaataccgccacctcattcacaccttcgttgctgaaggtatggagaatatggtgcatccgggaggattcgaacctccgaccgctcggttcgtagccgagtactctatccagctgagctacggatgcatcgggaaacttactttactgcagattttggtactgctgctaaagctgtatcaagtaagatggtgcatccgggaggattcgaacctccgaccgctcggttcgtagccgagtactctatccagctgagctacggatgcatcgggaaacttgctttactgccgatattgataccgctgctaaagccgtatcaagtaagagatggtgcatccgggaggatgactcactcggttcgcccttcgggccgttgctgaagcaacgttatcctccccggcgctggcgattatctcgcagaccgtgaaacaacagcgtagctgctatctcggagaagatggtgcatccgggaggattcgaacctccgaccgctcggttcgtagccgagtactctatccagctgagctacggatgcatcgggaaacttactttactgcagattttgatactgctgctaaagcagtatcaagtaagatggtgcatccgggaggatgactcgcccttcgggccgttgctaaagcaacgttatcctccctggtgcttgcggctaataccgccacctcattcacaccttcgttgctgaaggtatggagaatatggtgcatccgggaggattcgaacctccgaccgctcggttcgtagccgagtactctatccagctgagctacggatgcaaaatggcggtgaggcggggattcgaaccccggatgcagcttttgaccgcatactcccttagcaggggagcgccttcagcctctcggccacctcaccacacgcctcttacgagtgcttcgaagaacttgtttctgctcttcgtcgctgcgatggcgcacatattactttctggtacttataagtcaaaccttttttcgagacctttttttcgtttgcacacttcccgcgcaattagcctgtgaaaacggcaaaaagagtattttatcaacaagaaattgctgattacgccgcggctaacgcaaaagataactgtcgcggatgcggagaaagagacaaaaatgagaggctatcggagaggaaaattggcaaaaacggcgggtggaaggaggcgcctcacaaaatagcgaggcgcgaaaaccttagtaactggactgctgggatttttcagcctggatacgctggtagatctcttcacgatgcacggagacttctttaggggcattaacgccaatacgtacctggttacccttcacccctaaaactgtcacagtgacctcatctccaatcatgagggtctcaccaactcgacgagtcagaatcagcattctttgctccttgaaagattaaaagagtcgggtctctcgtatcccggcattatccatcatataacgccaaaaagtaagcgatgacaaacaccctacggtgtaagcagtcacggcatcacattctgttaaacctaagtttagccgatatacacaacttcaacccgactttatcgttatcagtgcttctcgcgcaagatgctgtaatccgagaatcacagcatctatgcaattatagttattacagttttgcgcttacccagcctttcacactggctaacgcagcagggagagcagacgcatcggtaccgccggcttgcgccatatccggacgaccgccccctttaccgcccacctgctgggcgagcataccaatcagttccccggctttaacgcggtctgtcacatccttagacacacctgcaatcagagaaaccttaccttctgcgaccgtggccaacacgacaatcgttgaacccagctgatttttcagatcgtcaaccatagtacgcagcattttcggctcaacgccggccagctcgctgaccagcagcttaacaccgttaatctcttccgctttgctggagagatttgcgctctcctgcacggcagcctgctctttcagctgctgcagctctttttccagctgacggctgcgttctaacgcggcgcggactttgtcaccgaggctgtgggtatcccctttcagcagctgtgcaatatcgcccagcagatcgctctgcgcgtgcagcatcgccatcgcgccttcgccggtcaccgcttcgatacggcgcacgccagcggcggtaccggattcagaggtaatgcggaacaggccgatatcaccggtgcgcgaggcgtgcgtaccgccgcacagctcggtggaaaaatcgcccatgctcagcacgcgaacgcgatcgtcatatttctcgccaaacagcgccatcgcgccggattcacgcgcagcgtcaatatccatgatattggtttcgatcggcaggttgcgacgaatttgcgcgttcaccagatcttctaccgcacggatctcctccggcttcatcgcttcaaaatgcgagaagtcgaagcgcaatgctttgtcgttgaccagagagcctttctgcgcaacgtgcgtaccgagaacctggcgcagcgccgcgtgcatcaggtgcgtcgcggagtggttcaggcggatacgctggcggcgagcctgatcgacatcggcctgcacggcgtcgccgactttaagcgaaccgctggtcagtttaccaatatggccaattgcctggccgtacttctgcgcgtcgctgacctggaaggagaaaccggcgcccttcagttcgcctttgtcacccacctggccgccggattcggcgtagaacggcgtctggtcgaggataacaaccgcttcctgaccggcgttcaccgcgtcaaccgctttaccatcgataaacagcgcggtgactttgccattcagttccaggctgtcatagcctttaaactcagaggcgccgtcgacgcggatcatcgcattgtagtccgcgccaaagccgctggattcgcgcgcgcgacggcgctgctcttccatcgcggcttcaaagccggcttcgtcaaccttgatgttgcgttcgcggcaaacgtccgcggtcaggtcaaccgggaagccgtaggtgtcgtacaggcggaaagcggtttcgccgtccagcgtgtcgccctgcagtttagccagctcttcatccagcagcgccagtccgcgctccagcgtacgggcaaactgctcttcttcggtcttcagcacctgctcaacctgagcctgctgctgtttcagctcttcgccagcggaacccatcacgtcaatcagcggggcaaccagtttccagaagaaggtctccttcgcgcccagcatgttgccatggcgaattgcgcgacgaatgatgcggcgcagcacgtagccgcggttttcattcgacgggataacgccatcggcaatcaggaatgcgcaggagcgaatgtggtcagcgataacgcgcagcgacttgttcgagagatcggtcgcgccggtaaccttcgccacgctcttaatcagatcgcggaacaggtcgatatcgtagttggagttgacgtgctgcagcacggcggcaatacgctcgaggcccataccggtatctacggacggcttcggcagcggctccatggttccgtcagcctgacggttgaactgcatgaagacgatattccagatctcaatatagcgatcgccgtcttcttccggcgttcccggagggccgccccagatatggtcgccatggtcgaagaagatttcggtgcatggaccgcacggcccggtgtcacccatctgccagaagttatcggaagcaaacggcgcgcctttgttgtcgccgatgcggataatacgctcgcgcggtacgccaacttcatttgcccagatatcgaacgcttcatcgtcggtttcgtagacggtcacccacagtttttctttcggcagggcgaaccagttttcaccggtcagcagctcccatgcgtatttgatggcatcctgcttgaagtaatcgccaaagctgaagttacccagcatttcaaagaaggtgtggtgacgcgcggtgtagccgacgttttccagatcgttgtgcttaccacccgcacgaacgcaacgctgcgcggtggtcgcgcgcgaataattacgtttgtcgagaccaaggaaaacatccttgaactggttcatcccggcgttggtaaacagcagggtcgggtcgttatgcggcaccagggagctgctcgcaactacctgatgtcctttactatggaaaaagtcgagaaacgcctgacggatctcagcggtgctcttgctcataattatcctgaaatcaagctaacgaaatgtcgctggcagccactacccagtatcgaccggcaggctactcacgaaaataaagtgggaataagataagttttcttcacggggaagtaaaatcccggatgggtcaatctgcaaaatttcgccagatttcctgaatatcctccatcagatagccgcggtagagcaaaaagcgctgaattttgactttttctgcaaatacgctgggcagggggtcgccatattttcgctgcgcctgctctttggcaagccgcgcccagtcgatttcgcactcgcgcatggctgcctctgtcgtctcgcgggagatccccttctgctttagctcctggcggacgcgcgccgggccgtaccccttgcggctgcggctggcaatgaactgacggacaaagcgttcgtcgtccagatagcggttctcaatgcaccattcaacgactttatcgacctcttccggcgtcacatctaacgcttcagggccgtttttgctcatgaccggtgcagccagttttcgccttagctcctgttcgctgtggtcgcgcattgccagaatgcgaatcgcgcgatccagcagcctggcgtagtcagagcggcgggatgaagtttcagtcacggtcagcctcgctaatcaaaaaaagcaaaagggccgcataagcggccccttgttagtctgttcagacgatatcagaaatcttgcccggtttccgcttcgctgttgccatcaaccgcgaagtctggcgtggagtcctgattgctcagcagcagttcacgaactttcttctcgatctcttttgccgcagccgggttctctttcagccaggagatggcgttcgctttaccctgaccgattttatcaccgttatagctgtaccatgcgccggctttctcaatcagcttctctttcacgccgagatcgaccagctcaccgaagaagttaatcccttcgccgtagaggatctggaattcagcctgtttaaacggcgcggcaattttgtttttcaccactttaacgcgggtttcgctgccgacaacgttgtcgccctctttcaccgcaccgatacgacggatatccagacgcacggaggcgtagaacttcagcgcgttaccgccggtggtggtttccgggttaccgaacatcacgccaattttcatacgaatctggttgatgaagatgagcagggtgttggactgcttcaggttgcccgccagtttacgcatcgcctggctcatcatacgcgccgcgaggcccatatgagagtcgccgatttcgccttcgatttccgctttcggcgtcagcgccgcaacggagtcaacgacgataacgtctaccgcaccggaacgcgccagcgcgtcacagatttccagagcctgttcgccggtatccggctgggagcacagcaggttgtcgatatcgacgcccagcttgcgtgcgtaaaccgggtccagcgcgtgttccgcatcgataaacgcacaggttttgccttcgcgctgcgcggcggcgataacctgcagcgtcagcgtggttttaccggaagattcaggcccgtagatctcgacgatacggcccatcggcaggccgcctgcgcccagggcgatatcaagggaaagcgagccggtggagatagtttccacatccatggaacggtcttcacccaggcgcatgatggagcctttaccgaattgtttttcgatctggcccagtgctgccgccaacgctttctgtttgttttcgtcgatagccattattactcctctcatgccgggtgtaaccgggtagtgaattctgttctgttgaagcaattatactgtatagtcatacagtatcaagtattttgtagaaattgttgccagaggagatttagcgcgtaggccgtggcctggcggcgtaccgactcgcggtctccggcaaagcattcgcgccgggttacgccctgtccgctggcgctggccacgccaaaccagacggttcccaccggcttttccgcgctgccaccgtccggcccggcgatgccgctgaccgaaatggcatagtccgcgcgagccgcacgcagcgcgccgatggccatctccaccaccaccggttcactcaccgcgccatggctaagcagcgtcgcttcgctgacgccaatcatctgcgatttcgcttcattgctgtaagtgacgaaaccgcgctcaaaccatgccgaactgccggcgatatcggtaagggttttggcgacccagccgccggtgcaggactccgccgtggtcaccgtcgcaccgcgcgctttcagcgccatccccacctgctcgctcagctgcattaattccgaatctgtcattcgtcgccccacttaagctgtacaaagaggccatcaaagatagcactttcaacggagatatggggacgaggtaacgaatttacgagtcggctggcgaaaaacatcggctatggccaacgccgcattttcggatagccgcccgggggcgccggtgtcacaattcaccgcacatataaggaagagttaaatgagaggttaccaggaatggccaaagcaacgcttacctcagagcagaacgtgaaaaaaattcgccaggtgcgcctgtacctgtttgtatgcggcacagtttcactgctaaccgcgctactgcatattttcacccgctcattcaacccgctgttcgaaggcgtacagatcctgctgggcgtgggctgtattgccagtggattcacattgaacaaaaaaatcaagcagatactcgcagaaccatagcggcggataaccggcccattgcgggccggtttttatttatttcatactcgccgcgatcagctccacgttgtgacgcagcattttcacgtagctgtccgccacgccgcccggttgagagagggcttcagggtagagctctcctcccggctgcgcgcccgtcgcgctggcaatctgtttaaccagtcttggatcaagctgattttccataaaccaggtatgcacctcgtcggctttaatttgtcgaattaatgccgccacctgcgccgcgctggcctcactttccgaagatagcccctgcggcgcgaggaaagtcacgccataggcgcggccaaaatagccgaaagcatcatggctggtcagaaccttacgctttgcctgtggaatggcggtgaactggcttttagcccagcgatcgatctcgttaagctggctgatatagcgcttgccggaggcctccaacgccaacttatcttccgggtcggctttcaccaggccgttgaggatattctgcgcgtacagcgcaccgttcgcggcgctgttccacgcatgcggatcggttaccgttgcgccatcttcttcaagcgtgtgggttttgactccgcgggaagccaccaccagctcgcctttgaacccggatgctttaatcagccggtccagccagccctccagccccaggccgttgaccaccaccacatcggcgttgttcagcagcgcgctgtctttcggcgagggctcgaaggtatgcggatcgccgtccggccccactagcgtatccacatgcacatgttcgccgccaatctgctgcaccatatcgcccaacacggaaaaactgctcaccacgtttagcgttttcgccatcaccccgtgcgatgccagacccagcgccagcgccagccatatcccggtacgtttcatcattgtccttaccccattaatttacgccagccgacaaccagccggctgcgcgagccaaaaaacaccgatacaaaaaagaggccgctggcggtcagcacaatggcgggtccggcaggcaaattcgccgcccacgacaggctcagccccatccacgcgcaaaaaccgcccatcagcgccgccagcagcagaatgcccggcagcgtccgcgcccagcagcgcgccgcgaccgcgggcagcatcatgacccccaccgccatcagcgtgccgagcacctgaaacccggccaccagattgagcaccagcagggcgaggaacaggccgtgcagcagcgcaggcactcttcgcgcattcacctgaagccagacgctgtcgaaggcttcgctgaccaggccgcgataaaacagggcgatgcaaatcagcgtcaggctggcaacgccggtcacaaacagcgccgaatcgcggtctaccgccagaatcgagccgaacagcagatgcagcaggtcgacgttagagccgcgcagcgagaccagcgtgacgcccagcgccagggagccgagataaaatccggcaaagctggcatcctcttttaaaagcgtgcgtcggctgacccaccccgccaccagcgccaccgcaatgccggcaataaaacccccgacggtcatcgccagcagcgacatcccgttaagcaggtagcccaccgccacgccgggcaaaatcgcatgcgagagcgcatcgcccatcaggctcatgcggcgtaaaagtaagaagacgccgagcatggtcgtgctcagggagagcgccaggcacaccaccagcgcgcggcgcataaagccaaactcgataaagggctgaatgaaggtgtgccagatcatgccagcctcgcggagtgaaaggcgggcagcacatcaggcgtactgccccagcgggcgcgctgcggcgtcagcagcatcgtttccgggaaatagtcggcgacccgctggttatcgtgcagcaccgccagaatcgtctgcccctgctgatgcatttccaggatcagcgccatcagctcacggcaggtggcttcgtcgatgccggtaaacggttcgtcgagcatcaccagcggcgcgcgctgcaccatcaccctcgcgaagagcatgcgctgaaactggccgccggagagcgcctcaatcggcgttttcgccatcgctagcagccccacccgcgctatggccgcgacgatacgctggcgcacctcccccccgagcccgcgcagcaacgatacctgcggccaggccccctggctgacgacatcctgcaccgtgagcggaaactgcgactccagcgcatgccgctgcgccagccagccgataaccggccgtccgtcgcgccagttcaggcggccgctgaccggcgggataaatccggccagcgtctttaacagcgtcgatttcccgcagccgttcaggccgacgatagccgtcatactccccgttgcaatcgtgccgctaagggacggcgcgatcgccagcccttcatagccagccaccagatgatcgagctctatcatggcagcgataccgcccaccaggttgccagccacagggcggccagcagcacgccggccatcgccagccgggcgatgcctgaagtcatcaataaggaagtcaatgtttacgcctcaataaaacgttataacataacaatattaaaagaagcgcggaatgtaaattggcgtcaacaaaaggaaatgctgcaaaatgttacagactcctctccggacggagaggagcacagaagacgggattactgcatccgggcctgagaaaccgccagaccgagctgccagacggccatcgcgtaatgggtgctgtggttatagcgggtaatagtgtagaagttcggcagaccgtaccagtactggtagcctgtgccgatatccagacgcagcaggctcgcctgctggtggttacccagcggctgagtcggggtaagtcccgccgccgccagctgcgagacgctgtatttggttttgaacccattgttcagcccaggcgcctggcccagcgcctgtaccgcaaccagatcgccgctcacccagccgtgctgcttgaagtagttcgctacgctgccgatcgcatcgaccggatcccacaggttgatatgcccgtcgccgttaaagtccaccgcgtactgcctgtaagaagagggcataaactgaccgtagcccatcgcgccggcgaaggagcctttcagatcgagcgggtcatcctgttcgctgcgcgccatcagcaggaacgtttccagctcgctggagaagtattctgcgcggcgcggatagttaaatgacagcgtcgccagcgcatcaaggatgcgggttttccccatcacccggccccagcgggtctcgacgccaataatcccgacgataatttccggcggcacgccgtaaacctggtacgcgcggttgagcgcatcctgatactggttccagaatgccacgccgttctgcacgttatccggggtaataaactgttttttgtagcgcagccaggcgccgtttggccctgacggcggcagcccggtgggcgcctggcggtccatcagacgcagcacatagtccaggcgtttggcctgcgagagaatttgatgcagctgctgtcggtcgaagccgtgcttgctcaccattttatcaatgaactgttccgccgccgggttattggcgaaatcgccgctcatctccatcacgttatgctgcggctcgagtaaaaaaccgcccgtgccgcccgccatttccttttccgcaggagtttgaggtttgctgctgcaggcagcgaggagaacgcacagggggagtaaagccagggaacgacgcttcaacatgggacatccatttaacaaatcggcaaggggtaattatggtaaagcatgcgcccgctcacaaggaagcggcggcaatgtaaattcttttttatcgccctttttcctctcgccccgccggatccttcgttcactccagccacaatctttcaaaataaaatatttatctttcattttgcgatcaatataacaatttcaaaccttttaaaatgattaaaattagctgccagttagcaagaaaaataacacgctgaaggagagaacaatgattgaagtcgttacccacggcgccgaatggtttatcggcctgtttcagaagggaggcgaggtgttcaccggtatggtcaccgggatcctgcctttgctgatcagtctgctggtgatcatgaacgcgctgatcaactttattggtcagcagcggatcgaaaagctggcgcagcgctgcgccggtaatccgatctcccgctacctgctgctgccctgcatcggcaccttcgttttctgtaacccgatgaccctgagccttgggcgctttatgcccgagaaatacaaaccgagctactacgcggcggcctcctacagctgccactcaatgaacggcctgtttccgcacatcaaccccggcgaactgttcgtctatctggggatcgccaacgggctaaccaccctcggtctgccgttagggccgctggcggtgagctatctgctggtgggcctggtgacgaacttcttccgcggctgggtgaccgacctgaccacgtcgatttttgagaaaaaaatggccatccagcttgagcagaaagtgcatctgtcaggagcgacatcatgacccgtattcgcattgaaaaaggcgccggcggctggggcggcccgctcgaactggacgccgttgccggtaaaaagattgtctatatcaccgcgggcacccgcccggcgatcgtcgataaaatcgcccgcctcaccggctggcaggcggtcgatggcttcaaagagggcgaaccgccggaagcggaaatcggcgtggcgattatcgactgcggcggcaccctgcgctgcggtatctacccgaagcgccgcatcccgaccattaatatccacgcgaccggcaaatcgggtccgctggcgcagtacatcgtcgaagacatttacgtttccggcgtcaaagaagagaacattttcgcgctggaagagggtccctccccggccccgcaggccgcgcctgcccagccggcggcccgcgactatgacaccagcaagaaaataaccgagcagagcgacggcctgctggccaaagttggtatggggatgggctcggtcgtggcggtgctgttccaggccgggcgcgacaccatcgatacggtgctgaaaaccattctgccgtttatggccttcgtcgcggcgctgatcggcatcatcatggcctccggcatcggcgactggattgcccacggcctggcgccgctcgccagccatccgctgggcctcgtcaccctggcgctgatctgctctttcccgctgctgtcgccgtttctcggccccggcgcggtcatcgcccaggttatcggcgtgctgattggcgtgcagattggccttggcaatattccgccgcatctcgccctgcccgcgctgttcgccattaacgcccaggccgcctgcgactttatcccggttggcctgtcgctggcggaagcgcgccaggacaccgtgcgcgtcggcgtaccgtcggtactggtgagccgcttcctgaccggcgcgccaacggtgctgatcgcctggttcgtttccggatttatttaccaataagaggtgcctgaagatgaccgtgatttaccagaccaccattacgcatatcggcgccagcgcggcgatggcgctggacgagcagatgctgatcaccttccgcgaaggcgccccggccgatatcgaagagtactgctttattcacaaccacggcgagctctccggcgcgctggtgccgggcgctgagctgcagctcggcgagctgcgctacccggtcaccgccgtcggcgacgtcgccgagcagaacctgcgcgagctgggccatatcacgctgcgctttgacggccaccgcgaagcggaattccccggaaccgtacacgtggcggggccggtgccggaaggcatcgccgccggctgcgtactgaaatttgttgcttaagttgtaaggagaaaattatgaatcaggttgctgttgtcatcggtgggggacaaaccttaggggagtttctgtgtcgcgggcttgccgcagaaggctatcgcgtggcggtggtcgatattcagagcgataaagcgacccgcgtcgcgcaggccatcaatgcagaacatggcgaaggcacggcgtggggcttcggcgcggacgccaccagcgaagccagcgtggtcgccctcgcccgcggggtagacgaaatattttcccgcgtcgacctgctggtctatagcgccgggatcgctaaagcggcgtttatcagcgacttcgcgctgggggatttcgaccgttcgctgcaggtgaatctggtgggctacttcctctgcgcccgcgagttttcccgcctgatgatccgcgacggcattaaaggacgcatcattcagatcaactctaaatccggcaaagtgggcagcaagcataactccggctatagcgcggcgaagtttggcggcgtggggctgacgcagtcgctggcgctggacctcgcggagtacgggattaccgtgcactccctgatgctcggcaacctgctgaagtcgccgatgttccagtctctgctgccgcagtacgccaccaagctggggatcccggaggagcaggtcgagcagtattacatcgacaaagtcccgctgaagcgcggctgcgattaccaggacgtacttaacgtgctgatgttttacgccagtccgcaggcttcatactgcaccgggcagtccatcaacgtcaccggcgggcaggtgatgttttaaaccagaggtcccggattgcgctgcgcttatccgggctacaaaaccggcaccccgcgccgatccgtagcccgggtaaggcgcaactcgtcgccctccggggaaatatcgcacacaccttaaggagacttttatggttaccgcacttatcaccgtcgccgccatcgcctggataacccagctcgcctttggcggctggcaaatcaggcagttcaatcgcgcattcgatcggctgtgccagcagggacgcgtcggcgtcggccgctcctcggggcggttcaagccgcgcgccgtcgtcgccatcgccgtcgacgaaaacgaccgcattcgcgatacgctgttaatgaaaggcctcaccgtcttcgccaggccgcaaaaaattcccgccctcaccggtaagcatcttaaggaattgcagcctgatgtgatctttcccaatgatccgctctgtcagaatgcactatcattagcgcttaatccgaaacatggataatttcgttgtgaacgttaatatcttgcgaaattatcatttcgaaactttaaacgcaggatacaacgcctatgaaaccacgtcagcgccaggcagccattctcgagcacctgcaatcgcagggcaaatgctcggtcgaagagctggcgcaacacttcgacaccaccggcaccaccatccgtaaggatctggtgatccttgagaatgccggtaccgttatccgcacttacggcggcgtggtgttaaataaagacgaggccgatccgcccatcgaccacaaaacgctgatcaacacccataaaaaagagcggattgccgaagccgcggtcagcttcattcacgatggcgactcgatcattcttgacgccggcagcacggtgctgcaaatggtgccgatgctcagccgcttcaataacattaccgtgatgaccaacagcctgcatatcgtcaacgccctctccgaactggataacgaacaaaccattctgatgccgggcggcacgttccgcaaaaaatcggcctcctttcacggccagctggcggaaaacgccttcgaacacttcagcttcgatcgactgtttatgggcaccgacggcattgatttaatcgccggcgtcaccacctttaatgaggtttatacggtcagcaaagcgatgtgcaatgccgcccgcgaagttatcctgatggccgactcgtcgaagtttggccgcaaaagtcccaatatcgtctgcggcctggagagcgtagacaaactgattaccgatgccgatatcagcccggaatttaagcgggcgctggaagacaaaggcatcgaagtcattattactggagaacatcatgagtaactttctgttagaagccggacgccagaccctgatgctggagcttcaggaggcgagccgcctgcctgaacgcctgggcgacgacttcatccgcgcggcggaaaccattatccactgcgagggcaaactggtcgtctccggtatcggtaaatcgggtcatattggtaaaaagctggccgccaccttcgccagcaccggcaccccggcattttttgttcacccggcggaagcgctgcacggcgacctcggcatgctcgacagccgcgacgtgatgctgtttatctcctactccggcagcgctaaagagctggatcttatcgttccgcgcctggaggaaaaatctattccgctgctggcgatgaccggtaaatccacttcaccgctggcgctggcggccaaagcggtgcttgatattgccgtagagcgtgaagcctgcccgatgcacctcgcgcccacctccagcaccgtcaataccctgatgctcggcgacgcgctggccatggcggtcatgcaggcccgcggctttaacgaagaagatttcgcccgttcgcacccggccggcgcgctgggcgcgcggctgctgaacaaagttcaccatctgatgcgccgcgacggcgacgtgccgcgcgtcgccaacgacaccagcgtcatggacgcgatgctcgaactcagccgcaccggcctggggctggtggcggtctgcgatgagcgcaaccacgtgcagggcgtctttaccgacggcgacctgcgccgctggctggtgggcggcggcagcttacaggatatcgtcagccaggcgatgacccgcaacggcgtcactctgcaagcggaaagccgcgcgatagaagccaaagagcgcctgatgaagcataaaatcagcgccgctccggtggtggatgaaagcggccagctggtcggcgcgattaacctgcagaacttttatcaggccgggatcctttaagccccagacgcttcgccagccggtgcaggttggcgacgtcgagccccagcgcgcgggcggcggcggcccagctgcggccattagcagccagcgcgctggcgatcgcttcgcgctggaacgcctccgtcgcctcgcgcaggctcaccgcttccgccgccggctgcgggctgacggtcggcaaggccggcgcttccccggccagctgaaaatgctgcggctccagcacgatatcattacccgcctgcgtcgcccgcgccagcaccaccgcccgatgaatcgcgtgctccagttcgcgtacgttgcccggccatgaccaggcgagcagcctggcccgagtcgcttcgcttaaaatcacctgcgccagccccatgcgcaaacggcactgttcgcaaaaatagccggccagcagcaccacatcactttcccgctcgcgcagcgccggaaccgacagaggaaacacgctcaggcgatgatacaggtcggcgcgaaagcgcccctccaccacctcctgacgcaggtcgcggttggtggccgccagcacccgcacatcaacccgcaggctgcgatcgtcgccgacgcgctgaatatcgccatactgcagcacccgcagcagcttggcctggagcgccagcgaaagctcgccaatttcatcgaggaacagcgtcccgttgtccgccatttcaaatttaccgctgcggttgctgatcgccccggtaaacgcccctttgacgtggccaaacagctcgctctccgccacgctctccggcagggccgcgcagttgagatagaccagcggattggccgcccgcggcgacccctgatgcaccgctttcgccaccagctctttgccggtgccggtctcgccgctaatcagcacgtttaagtcagaagccgcgacgatatcgatctcttttttcagctgcagcatcggcgccgacaggccaatcatctcctgacgttcggctgccggatacacgatagcctgctccggcagcacgttttgattctccagccgggcgatcagcagcgcgttattgagcgccccggccaccagggcggcaatcaggcgcagctcctcgtcgctgaagctgtcaaaacggtccgcatccataccgtcgagggtgagcgcgccgatcagggtttgcccggcaaacagcggcaggccgacgcaggcgtgcaccttcaggctctcctgcccggggatcaggccatcgtaagggtccggcagatcgctatccgccgggaagcgcaccacgtcccccgcccgggcaatcgcctccagccgcgggtggccttcaagggcaaagcgtcggccaagcacgtcctgggccaggccatcaatcgccagcggcacaaactggtgcgcctcgtagcgcagcagcgccgaagcatcgcagccgagtatctgccgcagggtggtaatcaaacgcgaaaaacggtcggcatggccgagatcgctttgtaaatcaatggcgattttcgccagggcctcgacggagaaactcattgtcgcctcatagtcattttgacaccaaacgtagtcatatcgactattttaactattgtcattttgacatcaacagatttaataaaaaacataaaacacttaaaattcaattaattaaaaagttggcacgcaacttgatataagcaaaacatcttatttgaacactgctgaattaattgaggttgctatgtctattctggttaaaaataacattcattgggttggccaacgcgactgggaagtgcgtgatttccacgggactgaatacaaaacgctgcgcggcagcagctacaacagctatctcatccgggaagaaaaaaatgtgctgatcgataccgtcgatcataaattcagccgtgaattcgtgcagaacctgcgcggtgaaatcgacctcgccgatattgattacatcattatcaaccatgctgaggaagaccatgccggcgcgctgaccgagctgatgacccagatcccggacacgccgatttactgtaccgccaacgccatcgactccatcaccggacaccatcatcacccggagtggaattttaaggtggtgaaaaccggcgacagcctggatatcggcaacggcaagcagctgatttttgtcgaaaccccgatgctgcactggccggatagcatgatgacctatatgaccggcgacgcggtgctgttcagcaacgacgccttcggccagcactactgcgatgaacatctgtttaatgatgaagttgaccaggttgagctttatgagcagtgccagcgctactatgccaatattctgaccccgttcagccgcctggtgacgccgaaaattaccgaaatcctcggctttaacctgccggtggatatgattgccacctcccacggcgtggtctggcgcgataacccgacgcagatcgtcgaaaaatatcttgagtgggcggcggattatcaggaagaccgcatcacgattttctacgacaccatgtccaacaacacccgcatgatggccgacgcgatagcccagggcattaccgacgtggatccgcgcgtggcggtgaaaattttcaacgtcgcccgcagcgataaaaatgaaatcctgaccaacgtgttccgctcgaagggcgtgctggtcggcacctcaaccatgaataacgtgatgatgccgaaaatcgccgggctggtggaggagatgaccggcctgcgtttccgtaacaagcgcgccagcgccttcggctcccacggctggagcggcggcgcggttgaccgcctgtccacgcgtttacaggatgcgggctttgaaatgtccctgagcctgaaggccaaatggcgcccggatctcgacgcgctggaagtgtgccgcgagcacggccgagaaatcgcccgccagtgggccctctccccgctgccggcgagccatgccaagcacgccgcgcctgaggcaacgccctgcgcagcgccagcggcagccgatctcggcccgaaaatgcagtgtagcgtttgccagtggatttacgaccccgaacagggcgaaccgaaccaggacgtccagccgggtacgccgtggagcgaagtcccggataacttcctctgccctgagtgttcgctgggtaaagatgtgtttgacgttctggcatcggaggcaaaatgagtgatggcatcgtcatcatcggctcgggcttcgcggcccgtcagctggtgaaaaatattcgcaagcaggacccgaatatcccgctgaccctgatcgccgccgacagcatggatgagtacaacaaaccggatctcagccatgtggtcagccgcgggcagaacgccgacgacctgaccctgcaaacggcgggcgagtttgccgagcagtacaatctgcgcctgtttccgcatacctgggtcagcgatatcgacgccgagcagcacctggtgaagagccaggaccgcgagtggcgctatgacaaactggtgcttgccaccggcgcgacgccgtttatcccaccggtgccgggccgcgagctgatgctgaccctgaacagccagcgggaatacggtgcggcgcaaagccagctgcgcgatgcaaaaagggtgctgatcgtcggcggcgggctgattggctgcgagctggcgatggatttctgccgcgccggcaaagcggtgacggtggtggataactccgccagcgtactgtcggccctgatgccgcccgaggccagcagccgactgcagcatcgtctgaccgacatgggcgtggatctgatgctgaagtcccagctggaaagcctgacgcagagcgccgacgggattcgcgtcacccttgaccgccagcgtacgatgacggtggatgcggtggtggccgccgccggtttacgcccggaaacggcgctggcgcggcatgcggggttgaaaactcaccgcggcgtggtggtgaacagccagctgcaaaccagccatccggcgatttacgccctcggcgactgcgcggaaatcaacggcatggtcctgccttttctgcagccgattctgctaagcgccatgtgcctgagtaaaaatctgctggcccagcagggagaactgaagctgccgccgatgctggtgaaggtcaaaacgccggatttaccgctgcacctggcgggcgatacccggcgcgaggatctgacgtggaatatcgttgccgccaaagacggcctggtcgcgaaaggcgttgacgccgagaaccagctgcgcgcttttgtggtcagcgaggatcgcatgaaagatgcttttgctctgctcaagcagctggtgagttaacctcgatgaaatgaggttattcccgggtcgcggcgtaaacgccttacccgggctaccggatctcagacggcagtagcccgggcaggcgccttgcgccgcccccgggagcagcgcgcagagtggcataatttcccggaggcgatgcttgcgcatctgtccaggctaccggccagcagacggccattaacctgtagcccggctaagcgcagcgcgagccggggaaatgcccaacctaccgcgccagattatcgtacccgcgccagcggtagttgagcaccgacagcacccagcaggccacgaacagcccgaccaccacaaaaccggcgtcgccgagatggtcgttcaatgcgccaacccagcgccagaggccgccgctcagagagaacttatccatcaacagccccagcgcttccagaccgccgataaacagcgccaccaccaccgaggtaccggtaatggtcatattgtaatagagcttgcgctgcggcttgctgaacgcccagccgtaggcgccgaccatcagcacgttatcgagcgtatccaccagcgccatcccgctggcgaacagcgccggaaaaaccataatcgaccaaatcgacaccccgctcgacgcgctggcggcggagatccccagcacgccgatttccgtcgccgtatcaaagccgaggccaaacagaaagcccaccagatacatctgccagctgcggctaatcaggcggaaggttttaccgaacaaccagctcatcatgccgccgccggtcatgacctcatcgcttaccttttcgccctgcttccacgcccgaaagctgcgccagacgctgcgcaaaatgaccaggttgataaaggccatcaccagcagaaacagcgccgacacggcggtgccgataacgctgccggtctcgtgaaaccagctcatctgctggccaaacgcggtggcggtcgcggcaatcgccgccgaagccagcaccacaatcgacgaatgccccagcgagaaccacgcgccaacggcaaaaggccgcttcccctgctgcatcattttgcgggtcacgttgtcgatggccgcgatatggtcggcgtccaccgcgtggcgcagaccataaccccaggccagcaggctggcggccatcagcgcgccgctgccgccgaacgccgtaaacgcccagccccaggtcagcaaattggcggcaatcaatgccagcaccagcgccgctgcgcgcggctgctgacgcaaaatcgtcactatcatatcggtgtcctttaagcctgcaggcgggccgcagcgataaccgcctggccgagggcaatcgcgccatcgcctgcgggcagctgctgcggaaagagcagagtaaaatcggccagataaaaggtcaatcgcgccgtcagcaggcggttgtgcagtaccccgccgccgaaggccagcgtgtgaatattccgcgcgttcgcgcaatcgcgcatcatcgccgccagcccgcgggccagcgcatcatgaaaggcccacgctttttgcgccgggctcgcctgccagctcagccactgctgccagaacgtcgccagatccagttttccatcgcgccacggcagggtcaccggatgatcaactccttcgcaggtcgccgccagcgcctccagacggcacgccgcttccccctcatagctcagagttagcggcgcgcactccagcgcgcaggcgacggcgtcaaacagacggccgcacgacgatgcctgcggcgcattaataccgcgctcgattgcccgcgccagcagcggccagctttgctggcgcagcgcggcggtgtcggcataattctgccactcggggacgaaggccaggcagtgggcgagcagattgcgccacggctgacgcgccgcgaggtcgccgccgggcagcgccaccgccggcagaccgccgagatgctcgcactcgcgatagttgacccgcaggcactcgccgccccacagcgcgccgttttcccccatcccgataccgtcgaggatcagggcaatcacgtcgccgccctcccgcggccagcggtgctcggccaggcaggcggcggcgtgggcatgatgatgcaacacgcggtccaccggcagcataagcgacgccgcccaccgcgaagcgcggtagccgggatgggcgtcggcaaccacccgctgcggggtaaaagcgtaaatctcctgcatcagacgcagcgcctgccgccactgcgcctcgacgccctcctcatcgagatcgccaaaatgctggctgagcaccgcttcatcgccgcgcagcaggcagaacgtatttttcatatccgcgccgagagccagcagcggcggtacgtcgtggaaacccggcggcagcgccagcgcgtccggcacgtagccgcgggcacggcgcagcatctcgccgctttgccgcaccacggaatcatccatccgctgcacaatctcgcgattatgcagcagaaatccgtcggcaattccggctaaatccgccagcgcctcggcgttggttaacgccggcgggcgaccgctaaggttgccggaggtcatcactaatgggcgcgccagcgcctgcgaaagtaaatgctgcagtggattagacggcagcatcccccctacttccgcaagccctggcgcaatctggtcgcacaggccggccacctgcgttttctccagcagcacgatcggcgcggcgggagaggtcagcagcgtcagcgccggttcatcgagccccgccgttgtcgccagcatcaccgccagcggtttcgccgggcgatgcttacgcgcccgcagcttcgccacggcctcgcggtttccggcgtcgcacagcagatggaaaccgcccagccccttcaccgccacaatatcgcccgccagcaggcgagcaatcgtcgcatctaaggcggcctcgccaaataaatgctcctgcgggccgcgccactccagctgcgggccgcactcggcgcaggctaccggctgcgcgtgaaagcggcgatcggcgggatcgccatattccgtcgcgcaggcggggcaaagaggaaacggcgacatagaggtcagcgggcggtcgtatggcatagcgcgaataatggtaaagcgcggcccgcagtgggtgcagttgataaacggatagcggtagcggcgctcccgcgggttgttcatctccgccaggcatgccgggcaggtagcggcatcgggcacaatctgcgtgcgcatgcttccggccccgctttggcggatggtaaagcccggcggcggcgcggcccagacaaaaggcgccgctgccgcgctgtcgatacgcgccagcggcgggcagcgccgggttaacgcggcgagaaatggcgcatcatcgccgacaaggcgcaccagcacgccgtcgccgtcgttgcacacgtcgccgcgcagctccagctgctgcgccagctgccagacgaaggggcggaatcccaccccctgcactttaccgcgaatgcggatttgcaccccgttcattgcgcgaccggcttaccaggccagcgcggtgcggcggcgtttttcgatattcatctgttcgagcttgttgcggtcgacgcaaatcagcgcgtgggtcggacaggcatccatacaggccgggccttcctcacggtggtggcaaaggtcgcatttgttggcttcggctttttccgccatcacgttcagccccgcgccgctgtggcggataaccgggcgcaccaccacttccatggcgccgtagggacaggccaccacgcaggttttgcagccgatgcagcgctcctgcatcacgtggacgaagccccgatcgcggctgatcgcgccgttcggacagacgttggcgcacggggcgtcctcgcactgacggcaggcggtggccgtcgacacgttgacgcctttgatcacgtgaatacgcggtaaaaagctttttggcgtcagcgcggcgcagtcctgattttcctgatgagagaccacgcaggccacttcacaggtgcggcagccgatgcatttgctcgcgtcggcgataatgaaacggttcatccatttctccagctgtaagaaggttacgcgccggagtatgcataatgcgttccaacttttatattactgatattaaagaagataaatacgggagatactgtcatcgtcagttgtgacgatgacagctgacgacgtcaggcgtgcgggccgggaaccatcgagtcgcgttcaatcagctcgccggggaagatttgctgaaatttaaaatcgccgccgtcgagcataaagatcagccggttgatgctctctttgatcatctccgtcaccgggactttgacgctggagagcgccggcaccataaacggcgccagcgcgatatcgtcaaagcccaccaccgaaacctgctccgggaccttgacgccgagctggtgcagctgcttcatcgcgccaaccgccatatcgtcgttgctcgccaccagtgcgctgtagccgacgcggcgctggcgcagcgtctcgactcccgccgcgccggtttccggcgtccagcggccttcgacgaccagatcgttattcagggcaatgccgccgcgggccagcgcgtctttatagcccgagaggcgctctacgccggttggcgaatccagcgaaccggtaataaacgcgatttcccgatggcccagcgcgataagcttttccaccgccatcatcgccgaggccttttgatcggaccagacgcagtggctggcgttgcggcgcaggcggcggttgagcaccatgatcggccgctcatgattttcgataatctcatccatctcatcaacgctgagaaagcgcggatagataataatcgcatcgcagcgcagatcgagcagatactgaatcgcctcgcgctcctcctcggcgctgtgcttgccgtcggcgaggatcagctgccgccctttgtcttcggtcatccgcgccacgtggtaaagcagttcgctgaaatagacgccgtgataaagggtgttggtcaccaccagcccgagggtctgggtctttttcgtcgccaggttgcgcgccagcagattcggccggtaaccgctttcggccaccgcctggaagacgcgatctttggtctcctggctgacatagccgttccccgacagcacccgcgaaacggtggcctttgacacccccgcgcgcttcgctacctccagcatcgttgccatgtggttattcctgttgccaatgttgcccgcagtgtactgcacgcgcagcgctttttcagcatttgcgcgtcgcccgcgctgatgcgcacacagcgatcaaaatcacaaaatcgagatcttatttttttatttcttgtatgcattcatgaaactaatcattattttgtggaaccggtttcctatgtatgcatgatgccgctccgctttccggcgcggcgacaagccagtaccccattgataaacaggataaaatccgatgtctaaaaattatgcagctctggcgcagcagattatcgcggcaattggcggcgcagataacgttgccgccgtcacccactgcatgacccgcctgcgtttcgtggtcaaagacaacgagcgggtcgacagcgccaccctcaaagggctgaaaggcgtgctcggcgtcgtgcgtagcgataaccagtgccaggtgatcgtgggcaataccgtctcccaggcgtatcgcgaagtggtcgcgctgctgccgggggatctacgccccgctgaaccgcaggggaaaccacccattaccctgaaacgcatcggcgccgggatcctcgacgcgctgatcggcaccatgtcgccgctgatcccggcgattatcggcggatcgatggttaagctgctggcaatgatcctcgagatgaccggcgcgctgcccaaaggcgcgtcaacgctgactattctgacggttatcggcgacggcgcgttcttcttcctgccgctgatggtcgcggcctccgcggcggtgaagttcaaaaccaatatgtcgctggcgattgcgattgccggggtgctggtacacccgagctttatcgagctgatggccaaagccgcccagggcgagcacgtggagttcgcctttattccggtgacggcggtgaaatacacctataccgtgatcccggcgctggtgatgacctggtgcctctcctatatcgaacgctgggtcgaccgtatcaccccggcggtgacaaaaaacttccttaaaccgatgctgatcgtgctgatcgccgctccgctgtcgattctgctgattggcccgctcggcatctggatcggtagcgccatttccgcgctggtctatacgatccacagctatctcggctggctgtcggtggcgattatgggggccctgtggccgctgctggtgatgaccgggatgcaccgggtctttaccccgactatcattcagaccatcgccgaaaccggcaaagagggcatggtaatgccgtcggaaatcggcgctaatctgtcgctgggcggttcgtcgctggcggtggcgtggaaaaccaaaaacccggagctgcgccagacggcgctggcggccgcggcttccgcgattctggcggggatttccgaaccggcgctgtacggcgtggcggtgcggctgaagcgaccgctgatcgccagcctgattagcggctttatctgcggcgcggtggccggcattgccgggctcgccagccactcgatggcggcgccggggttgtttaccagcgtccagtttttcgacccggccaatccgatgaccatcgtctgggtcttcggcgtcatggcgctggcggtagtgctgtcgtttgtcctgacgctaatgcttggctttgaagatattccgcaagaagaagccgccgccgacgccagacagcgccaggccggcacccaggcttctcacgcctgaacaccattttgttaacgaggtaacgcatggcgacttttccacagggatttttatggggcggcgcactggccgccaaccagtccgaaggggcatatctggagggcggcaaagggctgaccaccgtcgatatgattccccacggcgcgcaccgcctggcggtcaagctggggcaggagaaacgcttcgcgctgcgcgacgatgagttctacccgagccacgaggcgatcgatttttatcatcgttataaagaagatatcgccctgatggcggagatgggctttagcgtcttccgcacctctatcgcctggagccgtctgtttcctgagggcgatgagctggaaccgaacccggaagggatcgccttttatcgctcgctgttcgaggagtgcaaaaagcaccgcatcgagccgctggtgacgctgtgccatttcgacgtgccgatgcacctggtcaacgagtacggctcctggcgcaatcgaaaaatggtggagttcttcacccgctacgcccgcacctgctttgaagcctttgatggcttggtgaaatactggcttaccttcaatgaaatcaacatcatgctgcacagcccgttctccggcgccggtctggtgtttgaagagggggaaaatcaggagcaggtgaaataccaggccgcccatcacgaactggtcgccagcgccttagcgaccaaaatcgcccacgaggtgaatccgcaaaatcaggtcggctgtatgctggcgggcggcaacttctacccttactcctgtaagccggaagacgtgtggatggcgctggagaaagatcgcgagaacctgttctttatcgatgtccaggcgcgcggcgcgtatccggtctgggcggcgcgggtatttcgcgagaaaggcgtgactatcgccaaagaagcgggcgatgatgaaatcctgcgccataccgtcgatttcgtctccttcagctactacgcttcacgctgcgcgtcggcggagatgaacgccggcaacaccagcgccgccaatatcgttaaatcgctgaagaacccgcatattcaggccagcgaatggggctggggcatcgacccgctcggcctgcgcatcaccatgaatatgatgtatgaccgctaccagaaaccgctgttcctcgtggaaaacggtctcggcgcgcgggatgagattgacgctaacggcgagattaatgacgactaccgcatcagctatctgcgcgagcatattaaagcgatgggtgacgccatcgaggacggcattccggtgatgggctataccagctggggctgtatcgatctggtgtccgcctctaccggcgagatgagcaagcgctacggctttatctacgtcgaccgcgacgatgccggacacggcacgctggcgcgaaaacgcaaaaagtcgttctggtggtataagaaggtgattgccagcaacggggaagatttagcgtagtgcgccccgcagacggagggtgcctcagcttagcaaacacctgcaacacggaaattttccccggcttgcgctacgcttagccgggctacaggttcatcaacgctcgcggaccggtagcccgggtaaggcgtttacgccgcgacccgggaaaaaagtccacttgctccccctgacctaacttccggctacaggttcatcaacgctcgcggaccggtagcccgggtaaggcgtttacgccgcgacccgggaaaaagtccacttgctccccctgacctaacttccggctacaggttcatcaacgcccgcggaccggtagcccgggtaaggcgtttacgccgcgacccgggaaaaaagtacgcttgctcccccaggccgaactccaggctcgcgctgcgcttagccggggaacgccggctcctctgcggcttcaagtgccgcaaaaccgccattcccctgccagccatcaagccgcgcgtacaccacctcgaccgcgtccttaatcggctgggtcattggataataaaagccgacgatatccggctgaatgcctaagaaaatcacctcgccgatatcctcttttagctgatcgatcagatagttgagcggcatattgtgggtggtcatcataaacatctcggcgatatcgtccggatcgacgatgcggatctcgccggggttcaggcccatatcggtggcatcgactatcagcaggcgctcggggcgcagctcgcgaatggcgacgatatcgttttccggcgcgctgccgccgtcaatcaccacccattcgccgacgggattagccgcgcacatctccgccagcagcggacctgcgccgtcgtcgcccatcatactattgccgacacagagtaaaacgtcagtcacggagtctcctcaccatcaggtagatggcgctttcctggtgaatatcatgcagcatgctgagcagcgttttgctccacgcctgctgctcgggggtctgacgggcctgcgctttatcaaaagcgttggccagcatcgtcacatgattgctgtcaataacaatctcgccgtacttcggcacgccttccatttttcgccgcgcggtgctgccctcttcgagggtcgcaatccacgccagatacgcctgccacgggcagctcagcgccgcctcaaggcagtcgatgacgccgaggtggtggccaatcgccaggctgtaatagaccacctgctgcgcctggtcgggcgtcgcatcgttctcatcaataaatttacggctcagctgactgaacaccaccgtctcgctcatcggatacgcgctccctcgaccacctggttcagatgggtgacgatctcggtcaggcgcggatctttttccgcctccagccagcgcaccacctggctatcgccctgccccagcaggcgcatatagtcgtcggctatctggcgaccgtagcgatagcccgccagccggcgcgcttcgcggtcgatgcgcacccgcagcggctgtaccatatccgggtgcagaagctcggtcggccgttcgtcctgttcgcccggcacgcgggcgtggattttctgttccagcaggcccagcgccatcgcgaagccgtacagcgtcgcggcgggggtcggcgggcagccgggaatatagacatccaccggcacgattttatcggtgccgccccatacgcagtagaggtcgtggaagatgccgccgctgttgccgcaggcaccgtaggagatacagattttcgggtccggcgcggactgccacgcgcgcagcgcgggagaacgcatcgcccgggttaccgccccggtaaacagcagaatatcggcgtgacgcggcgacggcaccactttgatcccaaaacgctcggcgtcgaacagcggcgaaagggtagcgaaaatctcgatctcgcagccgttgcagccgccgcagtccacccggtagacgtaggcggaacgcttaattttcttcagcagcgatgccttcatgctggcgatggactcatccaccgtcatcggcaccggaatgccgttttcatcgcgcgggcctaataagttgctcatcagctggcctctctcatatggcgagtcagttcaatacggtcggacggcaccaggcacttctggcgtttacactccgggcaggtctcaaagctttcgcgatgcagctcggcgcggctgtcgccgttgtgtttgagcagcgcgatggcgtagtcgatctctttctgtacggcgaacggccgttcgcatacccgacagtggcagatggcaaaacgcgactgctggaggaaatcctcttttttccacaccgccagctcgtactcctgagagagcctaatcgccgccgtcgggcaaacctcttcgcagcgtccgcagaaaatgcagcgtccgaggttgaactgccacgccagctggttggtggccagatcggtctccaccgtcagggcgtttgacggacaggcgttaacgcaggcggcgcagccgatgcactgctgcgggttatgctccggtttgccgcggaagtttttatccaccggcatcggctccagcgggtatgagtgcgtcgcggtgccggttttgatgacttttttaataaaggtaaacatggcgattccttatttcagcggcgagttcttacgctcgatgctgtagcgctccagctctttgtacggcaccactttgcttttcttcttgcgcacgtcgactacggtcatgcggtcggtgcaggagtagcacgggtcgaggctgccgataatcagcggcgcgtcggagacggtattgccgcgcagcatatagcgcagggtcggccagttggcgtaggtcgccgcccggcagcgccagcggtacagcttctggttgtcgccggtcatgctccagtggatatcatctccgcgcggcgcttccgagaagcccagcgcgaagcggtgcggaatataggtgaacccttcgaccatcagcgggccgcccggcaggttatcgaggccgaagtcgatcatgttcagcgcggtgtagacctcgttgatgcgcaccttcaggcgcgagatgacgtcgcagccctgctcgctgtgcacttccatcggcagcaggccgtagccgacaaacgggtgatcggcgcgggtatcgcgggcgtggccgctggcgcgcaccatcgggccaacgttgctgaagtcgcgggcgatttgcgggtcgagacggccaatacccacggtacgctgctccatattcggcgtgctgagcagcatatctaccagctcctgcacgtcgcggcgcatctgctgcgccagctggcgggtctggatcatgtcctctttcagcagatcgcgacgaatgccgccaatcaggttcagaccgtaggttttacgcgccccggtaagaatttccgccatcttcatcgaggtttcgcgcacgcggaagaactgcataaacccggagtcgaagccggtaaagtggcaggcgaggccgaggttcagcaggtgcgagtgcaggcgctccacctccagcagaatggcgcggatcatctgcgcgcgctccggcaccacgatgcccatcgcgttctccaccgaagtggtgtaggcggtgctgtgggcgaaaccgcagataccgcacacgcggtccgacaggaaggtgacttcgttgtagcccatgcgggtttccgccagcttttccatcccgcgatggacgtagaacaggcggtagtcggcgtcgataatattctcgccgtcaacgaacaggcggaagtggcccggttcgtcggaggtgacgtgcagcgggccaatcggcaccacgttgttttcttgctgcccagctcgttgataaactcgtaggtttcggcgtcggtggtcggcgccggacgctggcggtagtccatgctgtctttacgcagcggatagagttcatccggccagtcgtccggcagcaccagccggcgctcgtccggcagccccaccggcaccaggccgtacatgtcgcgcacttcgcgctcgccccataccgccgccggcacccgcggcgtcaccgacggatactcgggtttattggcatccacttccacgcgcacggtgatccagcacttcgtgccctgctccatcgacagcacgtagtagacggcgtagtggccgttcagcttgcgttcatcgttgccgaacagcaccgacagccagccgccctgcttgtagtacagaaactcgaccacttccggcagatagttgaccttcaccgtgaccgtcaactggtctttggtctgccaggcttcatccagcaccacgcccggaaaggcctgatgcagcgcggcgagatagtgttgaccgattttttcttcagacatgctcaaactctcttaaatcacgccaccagcaaggagacgaaggctaaaaaggcaaaaccaaacccggcccaggtgacgcgggaggtggcgcaaaagcgcagacgcgccatgctgttttcgaacagcgcaatcaccagcacgccgagcaccagcttgacgacggcaaccaccagcgccagcagcagaccgccgacgctaaagctggtcatctgtccccacgggataaatacgccgacgaacatctgcaggaccaccagctgcttgaggctgatgccccacttcagcacgccgaagccgctgccgctgtattccgagagcgggccttcctgaagctcctgctccgcttccgccaggtcgaacggcagcttgcccatttcgataaaggtggcgaaggcgcaggcgcacagcgccagaatcagcggaagagtgcgggcgacaggccagtgataaatggtgtcggtgatgctgctgatatgggtggaccccgcgacctgcgccgcgacccacaggccgagcagcaggatgggctccaccagcacgccgagcatcgcttcgcggctggccccaatagcggtaaacgggctgccggtatcaaggccggaaatagcaaagaagaagcgggcgatagcgaacaggtagatcagggtgatcaggtcgcccagccccgccatcggcgaatcaacggtcaccaccggcagcgcggtggcgatggttagcatcacgccgaccatcacgtacggcgtcaggcggaagacccagccggaggcatccgggccaacgctctggcgccccagcagtttcagaatgtcccgatactcctgcagcacgcccggaccgcggcgattatgcagacgcgcgcgggcgacgcgggtcaccccggacaacagcggcgcgacggcgaacagcaccagcgcctgcaacaatgcaattaatacgctcattctcaggctcctcgggaaataacaatcaccaccagtaccgccagctccaccagcgccacgccgcgaaacagcgcgggcgcggaagcgttctgccagccgggcaccaggcgcaccgggttcagccagtggcgcagtttcagaatcggcgcaaaggcttctttcaccggcatggcgaaaccgtgggcggtcaccaccatggatttttcatggtcgtagccgcagacccaggccgccccgcgggagcgcgccggcaggcgatcgcccttgaagaagatcatcagcagcagcggcagcagcgggcaggcaatcagcagaatggcgatcatcggctgggacaccgcgctggagacctccgcctgcaccggaaacgccccgctcaccagcggcagcagccacggcgcggcaaccccgccaatcacgcagcagacggcggccagcaccacgctaaaggtcatcagccccggcgcgcaggtggcgttttccgcctctttgcttcgcggcgcgccgaggaaggtgacgccgtagactttcgccatacacatcaccgccagcgcgccggtaatcgccaggcccaccgccagcagcggcccgagcaggcggccaacaaacgcgtcgccggtgctcagcttaaagaaggactgatagataacccactccccggcaaagccgttcagcggcggcagcgcggccatcgccatcagacccaccagcatcgaaagggaaatcagcggcattttcttgccgatcccgccgagcttttcgatatcgcgatggccggtgcggaaccacaccgcccccgcgccgaggaacagggtggttttaaacaggctatggttgatcaggtgatacatgccgccaataaagcccagcaccatcagggtcgggttatgggtcgccacgccggtgacgaacgccccgaggccgagcaggataatgccgatgttttccagggtgtggtacgccagcaggcgctgaatattgtgctccatcagggcgtacagcccgccgacgaaggcggtgatcatccccagcaccagcagcatcacgccccaccacagcggcggtacgctgccggccagcgagaccgtcaggatgccgtagagaccgaccttcatcaccaccgtggaaaacagcgcggcggccggcgcgctggcgccggcgtgggcctgcggcgcccagccgtgcagcggaataactccggccagcagcgcaaagccgaccaggcccggcagccacagcagcgcgttctgcggcgccgccatcgccagctgggtaatctgcgccagctcaagggtgccgtaggacgaccagaccagccagcagctccacgccatcagcagcgtaccgaggcgacccagcgcaaaccacagcttgccggactgcgcgcagccggtaagaaacgcggcgcaaagggccataatctccgccatcaccaccagcgcgccgaagttcgtcaccacaacggcgcagacggcggcggccagcagcagattcaccagcaggccgttggctttcacctgcggatgacgatgccaggcgatattgaacagcgaaatcggcagcgccgacaggccgatcgccagcagccacagcgcgttgacgccgcccacgcgcagggtcaaatgcagcatctgcagcatgccgccgctaacgcgctccggcatcagcagcgccgttccgcccgccagcaccagcatcgcgctggcgaccgcgccgccaatcccggagatcgccccgctcagcggtttgcgcagggcgaacagaaacgccagcaccgcgctggcggcgtaccaggccaccgcctgattcactaaggaaatcacactcatttcacgtccccttgttgcgcctggaacagcgacagatcgccgagatcggtattaaaagtcagctgccgcttacgcttgctggcctgggcgatatcgcggatatccaccagcagcagcgctttggtcggacaggtgcgtacgcacgccgggccctgctcatcgaagtggcacaggtcgcatttgacggcgatggcgcgcacgcccggcacccagtcgagcagcgagctgacgcgggccggcgccggcggcgcggcgggggccaggggcgtattggcgttagccggcatatccagcggacggctgccggaaaactcaatggcgccgaacggacaggcgatgccgcacagcttgcagcttacgcacaggttctcattgagctgcaccgcgccatcgacgcgattaatggcgttaaccgggcagacggcggcgcagggcgcatcttcacagtggtggcacatctgcggcgcggattctttttcattgcgcattaaatgcagccggggcatggcctgcaggccctgctggcggtgagtctcagcgcaggcggcttcgcaggtgcgacagccgatacagacggtggagtcagcaattacaaaacggttcaccgggtcatcctcaggtgaaagtcatttttgacgaaaacaggttgcgcaggtgtcagcttcgacacttgtcgacacctgacgattaacgggccagcgtcaggtggcttaaatccaccggctggtcttgttcgatagcctcgtagagacggtcgtaaacgctggcgatagtcgccagatagtgctccagaacctgctcgcgatcgcggttgctgatccggccatcaatggtgccgtctgaacccagcgtggcctgggcaatcaggcgtctgtcgtcgccgtttttggtttcgacgtagtactcgatggtgtggctgttaaagccctccgccagcgccacgtagacctgaaagtggccaaaaagtacgaagcacagctctttatccggcgcgcagctcatggcgtgatgcagacgcgctttcgacagggttattccctgtaccagcgagttgcaataggtgtgccactgctcctgatgctggcggtgacgatcggcgatgtagtccgccttttcacttaattcccaaatagtcatcccggatcccccgttgtatgagatgcaccggttaagcacttttcatgccaaaatttaattaattgattttaaacatatttataaaatttcgggaggtagaaagacatgtcgatgacgacgtctgcagcgtgtcatcgacattttcgtgacattacctatgacctggcatcgttattgcattgaagggccatcgcgatacggaggcaccatgcacgaaatcactcttagccagcgggcgctggaaattatcgaacagcaggcgctgcaggccggcgcgcgtcgggtgaccggcgtgtggctaaaggtcggggcgttttcctgcgtggaggccagcgcgctgaccttctgctttgagctggtgtgccgcggcacgctggcggagggctgcgagctgcatatcgccgaacaacaggctgaatgctggtgtgaatcctgccagcagtacgtgcatctcatctcccagcacgtgcgccgctgcccgcagtgtcagagcgaccggctgcaaatcgtggcggatgacggcttacagattcagcgactagaagtggagtaataagattatgtgtacaacctgcggctgcggtgaaggcaacctttatatagaaggcgacgagcataacccgcattcggcgtttcgcagcgcccccttcgcgcccgccccgcgccagatgatgaacattaccggcgtgaaaaccgataacttttcccccacccgctcggaggctggcgacctgcactacggtcacggcgaggcgggtacccatgcgccgggccagagccagcggcggatgctggaagtggaaatcgacgtgctggataaaaacaaccgtctggccgcccgcaaccgcgcgcgcttcgccgctaaaaaccagctggtgctgaacctggtctccagccccggctccggcaaaaccaccctgctgacggaaaccctgctgcggctgaaagagaaaaccgcctgcgcggtgattgaaggcgatcagcaaacggtgaacgacgccgcgcgcatccgcgccaccggcaccccggcgattcaggtcaacaccggcaaaggctgccatctcgacgcgcagatgatcgccgacgccgcgccgcgcctgccgctggatgaccacgggatcctgtttatcgaaaacgtcggtaacctggtgtgtccggcgagctttgacctcggcgaacgtcataaagtggcggtgctgtcggtaaccgaaggcgaagacaagccgctgaagtatccgcatatgttcgccgccgccagcctgatgctgcttaacaaggtcgacctgctgccgtatctcaactttgacgtggagaagtgtctggcctgcgcccgcgaggtgaacccggatattgacatcatcctgctttccgccaccagcggcgaaggcatggaccagtggcttagctggctggagacgcaacaatgtgcataggcattcccggacaaatctgcgccattgacggcaatctggcgaaggtcgaagtgtgcggcattcagcgcgaagtcgacctgaccctggtgggcgcggttgacgatcgcggccagccgcgtctcggccagtgggtgctggtccacgtgggtttcgccatgagcgtgattaacgaagccgaagcccgcgataccctcgaggcgctgcaaaatatgtttgaagtcgagccggacgtcggcgcgctgctgtacggcgaggagcggtaaatgcgctatgtcgatgaataccgcgccccggaacaggtgatgcagctggtggaacacctccggcagcgcgcgcgcctgctgccgcataccgccgaacgtccgctgcgcattatggaagtgtgcggcggtcatacccacgccatttttaaatttggtctcgaccagctgctgccggaaaatatcgagtttattcacggccccggctgcccggtgtgcgtgctgccgatggggcgcatcgacgcctgtatcgatatcgccagccgtccgggggtgattttctgcacctttggcgacgccatgcgcgtgccgggaaaaaacggctcgctgctgcaggctaaatcgcgcggcgccgacgtccgcatcgtctattcgccgatggacgccctgaagctggcgcagcagcaccccgagcgtgaagtggtgttcttcggccttggttttgaaacgacgatgcccgccaccgccctgaccctgcgccaggcccgcgagcgcggcgtcgccaacttctattttttctgccagcacatcaccctgctgccgaccctgcgcagcctgctcgaccagccggataacggtatcgacgcgtttctcgcccccggtcacgtcagcatggtgattggcaccgacgcctacggatttatcgccagcgactatcatcgtcctttagtggtggcaggattcgaaccgcttgatctactgcaaggcgcggtgatgctggttgagcagacaatagcgcggcacagcgacgtggagaaccagtatcgccgggtggtgcccgatgcgggcaacccgctggcgcagtcggccatcgccgaggtgttttgccttagcggcgatagcgagtggcgcggtctgggggtgattaacgactccggcgtgcatctgacggccgcgtatcagcgtttcgacgccgaagcgcatttccgcccggcgccgcagcgggtcagcgacgacccgcgcgcccgctgcggcgaggtgctgaccggccgctgcaaaccgcaccagtgcccgctattcggcaatacctgcaacccgcagagcgcgttcggcgcgctgatggtctcatcggagggcgcctgtgccgcctggtatcaatatcgcagtcaggaaatcgaagcatgaaaagcgttcagttagcccacggtagcggcggtctggcaatgcagcagctgatcggcgacctgtttatgcaggctttcgccaacccctggctggcggagcaggaagatcaggcgcgtctcgatctcgcccagcttagcgcgcagggcgacaggctcgccttctccaccgacagctacgtcatcgatccgctgtttttcccaggcggcaacatcggcaagctggcggtctgcggcacggccaacgatgtggcggtgagcggcgcgctgccgcgctatctctcctgcgggtttattctcgaagaggggctggagatggccaccctcgaagcggtggtgaacagcatggcgcagaccgcgcgggaggccggcatcgccattgtcaccggcgataccaaagtggtgccgcgcggggcggcggataagctgtttatcaataccgccgggatcggcgtcatccctaccggtattcgctggggggcgcagcagattagcgcgggagacgtgctgctggtcagcggcacgcttggcgatcacggggcaacgatcctcaacctgcgcgaacagatggggcttgacggcgcgctgtccagcgactgcgcggtgctgacgcccttgattcagacgctgcgcgacgttgctggcgtgaaagccctgcgcgatgccacccgcggcggcgttaacgcggtggcccatgagtttgccgccgccagcggctgcgggattgaactgcacgagaataagctgccggtgaacgataccgtgcgcggcgtgtgcgagctgctggggctggacgcgcttaatttcgccaacgagggcaagctgctgatcgccgttgcccgcgaggcggcggaaagcgtacttgcgcatttacggtctcatccattaggccgcgatgcggcgataatcggcgaggttgtgccgcgcgcgggcgtgcgctctgttggtctgtacggcgtgaagcgcacgctggatcttcctcacgccgagccgctgccgagaatttgttaacggtgcgggaccccggattgcggctaaagccttatccgggctacaaaactgcgcgcacctgtagtccggctaagcgcagcgcgagccgggaaaagccagcatgattatccagcccaaaccagcgggcacccacggatgggttaatggcggtcacaaccgctttattaacagactattatttgtgtcatcactttcttctgcgccgctttgcggcgcttttggacttaagcaatgtcgtatacaccgatgggcgatcttgggcagcagggtctgtttgatatcacccgcattttattacagcagccggatctggccgcgctgagcgagacgctgaccggcctggtgcagcagtccgcgctcgccgaccgggcggcgattattctgtggcattccggcaaccatcgcgcggtccggcacgcctgcgacgacgcggggcagccggtgagctacgaggatgaaaccgtcctcgccaacggcccggttcgacgcctgctctcgcgcccggatgcgctgcattgcgatagcgccacctttgccgaaacctggccgcagctcgccgtaagcggactctaccccacctttggctattactgcctgctgccgctggcggcggaagggcgtattttcggcggctgcgaatttattcgcgacgacaaccggccgtggaccgaaaaagagtaccagcggctgcacacctttacgcaaatcgttgccgtggtcaccgaacagatccaaagccgggtcagcaacaacgttgattacgacctgctgtgccgggaacgcgacaacttccgcatcctggtggcgatcaccaacgcggtactctcgcggctggatatcgacgaactggtcagcgaagtggccaaagagatccaccgctacttccgcatcgacgccatcagcgtggtactgcgcagcaaccgcaaaggcaagctcaatatttactccacccactacctcgacgccagccacccggtgcacgaccagagcgaagtggacgaagccggtaccctgaccgaacgggtattcaaaagcaaagagatgctgctgctcaacctgcatcagcacgacccgctggcgccgtacgaaaaaatgcttttcgagatgtgggataacaaaattcagaccctgtgcctgctgccgttgatgtccggcaataccctgcttggggtgctgaagctggcgcagtgcgatgagaaagtcttcaccaccaccaacctcaagctgctgcggcaaatcgcagagcgcgtctcgatcgccatcgacaacgccctcgcctaccgcgagattcagcggctgaaagagcggctggtcgatgagaacctcgccctgaccgaacagcttaacaacgtcgagagcgagtttggcgaaatcatcggccgcagcgaggccatgaacagcgtgctcaagcaggtggagatggtggcgcagagcgacagcacggtgctaatcctcggcgaaaccggcaccggtaaggagctgattgcccgcgctattcataatctgagcggccgcaatagccgccggatggtcaaaatgaactgcgcggcgatgcccgccgggctgctggaaagcgacctgtttggccacgagcgcggcgccttcaccggcgccagcgcccagcgtatcggccgtttcgaactggcggacaaaagctcgctgtttctcgatgaagtgggcgacatgccgattgaactacagccgaaactgctgcgcgtattgcaggagcaggagttcgagcgtctcggcagcaataagctgattcacaccgacgtgcgcctgatcgccgccaccaaccgcgatcttaagcaaatggtcgccgatcgcgagtttcgcagcgatctctactatcggctgaacgtcttcccgatccacctgcctcccctgcgcgagcggccggaggatattcccctgctggtgaaggccttcacctttaaaattgcccgccgtctcgggcgcaacattgacagcattccggcggaaacgctgcgcctgctcagccgcatggagtggccgggtaacgtgcgcgaactggagaacgtcattgagcgcgcggtgctgctgacccgcggcagcgtgctgcagctctccttaccggaaatgagtatcgagacggagccgctggcggcggaagtgctgccggaggaaggggaagacgaataccagctgattgtccgggtgctgaaagagagcaacggcgtggtcgccggaccgaagggcgcggcccagcgtctgggattaaagcgcacgacgctgctttcgcgcatgaaacggttgggtattaataaagaccagctgcagtaggcacatcttcagaacgctgtttcattttgattttaatgaaacagcgttctgtgagacaactcgctttacccgttcctgatgaatgataaataagccttttccttaatggagatgcttatgacgcgtttacctctggccgccgccatcgctttgcttttggcttctcaggctgcattttcctctcttcccaccttttccgtctggcccggcggtgaagcgcccggcgcgaaaaacagcccggcgagcgaatcgctggtggagcgcagcaaagatccctcgctgcccgatcgcgcggtcaccggcgttcgcgctccgacaattaccgtttacgcgccggagaagcccaacggtatcgcgctgctggtgacgccgggcggctcttaccagcgagtggtattggataaagagggcagcgatctcaccccggtatttaacgcccggggctataccctgtttgtgatgacctaccggatgccggcggacggtcacgcggaaggcagcgaggcgccgttggccgatgcgcagcgcgcgctgcgtaccctgcgggcgcgggccgccgagtggcatatcgacccgcaaaaaatcggcattatgggcttttccgccgggggacacgtggcggcaagcctggagacccgctatagcgaaccggcttacgccgccgtggacgcggttgaccagcagagcgcgcggccggacttcgcggtgctcggctatccggttatttccatggatccggcgattgcccatcccggatcgcgcaaggcattgattggcgaaacggcgacggcagagcggcagcaccgctattcaccggagcagaacgtcacgccgcaaacgccgccgacctttattttccacgcggtggacgatccttccgtgccggtggataacgcgctggtgatgtttaacgccctgcgcgcgcagcaggtgccgaccgagctgcatctgttcgccgaggggaaacacggatttggcattcgcgggacccggggcctgcccgccgccgagtggccgcagctggcgatgaactggatagcctcgctggcggaaatgaaaaaatagcgccggtaatccccggctcgcggctgacgccttagccgggctacctgtccgcagacggcggggacctcgaagccccggtaggtacggtttcccggaggcgatgctgcgcatctgtccgggctacaagttcgtgcggtttagtagcccggacaggcgcgtcaagcgccgcctccgggggattttgccgagctatttatcagaactgaagccgttgctggtcgccagttcggcaaaccacagcgcgttgcgctttatctgccgctctccggtttgcaggttgagccgccagaaaccgtagcggcgcttgaacgagttaatccacgaccagttatcgataaaggtccactgatgcacgccaaagcagttcgcgccgtcggctatcgcgcgatgcagctgcaccagatgctcttccatcaggccgatgcggaacgaatcgtcaatcaccccgtctgcgccgggttcgccttccgactcaatatccatcgcaataccaatttccgcgaggaaccactttatattgccgtagttatcgcgaatattggcggcaatgtcataaatcgcctgcggcagaatctcattattatcgcgataaggattaaagcgtccttgcggattcacgtagttttcgaaatagaactccggggtgaaatagtccagcgtatagtcgctttcgcgcgccttcacccggcgcggaacgtaatagttaacgccgagaaaatcgacgcgcgatccggtaatcagctccacgtcggcttttgtcacctccggcaggcagtcgtgcgcggccagaatttcgcacagcgctttcgggaactgatgcttcaccagcggatcgaggaagctgcggttgaagaacagatccgcataccacgccgctttttggtcttccgcgctgtcgttgcgggtataggacggcgtcagattcagcaccacgccaatctcgctttccagcgccagcgcgcgaaactcgcgcaccgctttggcgtgggccagcataatgttaaacgccacctgcgccgccagcctgccgtctttcttgcagggatagtggaagtcgtacaggtagccgccctcaaccggcacaatcggctcgttgaaggtaatccagtatttcaccttgtgaccgaatagctcaaaagcggtacgggcaaaacgcgcgaaaagatcggtcacgtgcgccgactcaaagccgccgtactgcttttgcagcgcttccggcatgtcaaaatgatagaggttgatcatcggctcgatgccgttttcaatcatctcatcaaggtaggcatgatagaaacgcaccgcgtccgcattgggcgcgccggtttcgaagtcgtcaatcagccgcgaccactgaatcgacgtgcggaaggagttgaacccggtccgcttcatcaacgccacgtcctggggatactgatgataggtgtcgcaaacggtttgcggcccaatctgctgataaaaacgttccggctgttcggcaaaccagctatcccaaatagaacggtgcggcttgttgcttatcccttccgtttgcggaccggatgccgccgcgccccataaaaagccttccggaaactgataccgggtcataacgcctcctgtaagttaaaaaaggccgcacccaacgggcgcagccaataagcactactctgcaaccacttcaatcgatttgataaacatgtagccccagtcgccggcgaatttaccgaagtcgatgcggttatcgccggccttcagctcaaccggcaccagcagctgctggccctgctcatcggtctgcgggaattcaaccgcgattggcgcgccgtcgttgacgataaacgagtttttcttgctgccccatttgccgctgaacgtcacccgcagctgatacttgccggcccacggcgcggaaacctgccagctgaccttatccccgtcgttggcgaacggtccgaggaagccgtcgtcgccaatcgccagcgcgtctttttcgcttttcgccgccgcaatcttgccatcggtcacgttcaataccccgccgccaaaacggcagtagtcggcggcgactttaccgacggcttccgtcaccgtgaccttaacggttttgctgcttttgagcaggccgtcatcggcgctaaaagtcagcgcgtattcaccgggagcgctgaaccaggcgcgggtttcggctttatccgtcgcgcagaagtgggcctgcgcgctgccgccgttgctccagctcaccgtcacgttgcggtccgggagggcgtcatcgcgccagctcgcgctgagctgcacgccctggtcctggctggtggtgagcgtctccgccagcgccactactggcgcctgattcgcctgagaatgcttcacgctaatcacgttcgaaggcgatgaactgccgctctcgtttttagcgatgacgcggtaatagtacgtattccccagccgcagactgcgatagtcatcgcggaacagatccatcgtctgcgggttccactcgttaacgccgtcggaaatgtcgcgccccacgaccttccacggtccggatgccgaatcggcgcgctcaacatcataggcgcgccctaccgccgcccccagccagttgatcgcaaacggtgaatccgttggccgcagcgtcggcgcgtcaggtttcggcagcggcggcgctttctcctgcccgttcatctgcgcggcggcggtgcgcaccaggtcgaccacctccatctcctggttggccttaccttcgaccgggaagcccggcagatggtagctgtagtggccggtggactctttgtgccagtagaagccgccgtcgtgacgatgaccgcggaagccccagattaaaccgcccgccgcctgcgcgccgttgacttcgctatggacgatcgactgcataatggcgttaagctgctgcgcgtccagcaggccaaattcgcccaccatgtagactttcttacccgctgccgccgtcaggtcttttttcacctgttcgggatggttgttatcggcattggtgtagtaatggttgctgacgatatcgacatggggatcgttaagcgcaaacgcattaattttcttgtaggtgccatccaccaccagctggtgcggcgcccactttttgatccacgcggcggtctgctgaaggaacgccgcgttggtgtcctccagctcgttgccggtctcccaggccataatcgctttttcgtcgtaataggggcgcccggtcacgctgttggtacgggtgataacctgacgaatcacgtccagataggccttgaaggttttactgtcggtacggtaaaaatcctccggcttttcgtggtagaacgccgccagctgctcgcgaccgccccaccaccaccagtgatcgataaacggcagaatcaggcgcagcccctgtttgtccgcctcggcgatcatgttgtcgtacacccgcatcgccttttcgttcaggcgcggcatgccgtcggcggtttccggggccagaatatgggtttcgcgaccgcaggcctcgtcaaacgtctgctgcaccgagagcacgtatacccgctgcgccctggcgccggtttgcacgagcgctttaatccagttttcctgttcctccgccgtcggccagcggaagtattgcccccagccgcgcgagtcggccttgcagataccgcgcgcatcgtcctcgatacggtgcagttccggcgcatgaatgcccgcaaagcggaacaccttgtcgccatcttttaacgttgcgccgtcgcgggtaataaagtgttcaaagtgcgactgctccgcggccatcgcgcctgcgcttcccagcgccgaaagcagcgcgacgagcatcagttttttcaccggcttaatcatcgttatctctccttagaaccagacttcggcctgcacgccgaaattcagcgtatcggtgtcgccgctgcgcgagtagctaccggcggaaagggtattggtgctccagtcgtagttgccgtccagcgcgtcggacacccctttatcccacttcgcgtaagtcacgaagaagcgcagctgcgggcgagtccagaagccggaatcaaaggtcagggtcggcgcgatggtcactttagtcaggccgcctttgcctttgccgtccacgcctttgtagtttttatcgtcgagatattcgtagcccagctcgtactgcatggcgaagtttttggtgatctgctggtacgggcgaatccccgccacccagctggtgcgcccccagccttcggcgtcttccgtccaccagcggtagtttttgtctttctgatagtaggcgaacgtggagatttcccagtcgccgagcgaggccatgttatccagcaccacgcgccaggactgggtatcgtcgaggtttgcccagccccagccgtttttacccagcgagtctcccgccgccaggccgcgcccgtactggaagaccacgcgagagtagccgccggtcaggccgtaaaagccgtcaaagttgtaaacgccggtcacgccgtagcccttctccgccgaggtcgggtgcttctcgttgcggttcatgtggtggccaatcagctcaagatcgaagccggtgccgccgatctttttcagccacaggttgagcgagtagtcatccggatagccctgatcgcctttatcgaccgggtaggctttggtttcatccgtcggcgagaaggcgtaaaccccggcatcgaagcgcgcgaagccgagatccatgttgtcgaagccgccgccggtaccgttgtactgaatgtactcccagtcgaactggtggctggaggtgttggagctgctgtagcgcttaccggcccagaaggtcatttccggggcgaagtcgaggtttgacagttcggcaaaaccctcacggaactgcacatcatgcccgtcgtcatcctgacagttccagtctgaggtgcatttcgactgatgggtaatgttggcctggactttagccaccacgccgctgtccgaggttaacgtcaccgtcgggatcagttcgatcttggtgtcctcttcgttgcccagacgccacttgccgtccggcatcaggccaacggagtcggcgcggttaccgtcggcgttggcgaggatccccgaacggatatagccgtggagcataaaatcgtacttcggatcggcgatggcgcagtcgctcatcaccgcgagggcgagtaaagacagaggtattgaatgatttagcctgatcattttttatccttggttatttttttattaacactgcctgagaacgggaggaaatttacggatcaaaactggaaatgtacatccgttaatggaaaacgctttccgtaattgccggatgagttcacaaatttaacgatagcgggcaaatattcgtgatttagatcacgtctttaagcggaaataaaaaagcccgcgcgcggcgggctgtggcaggcaggcgaaaagcttagcgttcggcatcggcgagctgccgttcatagaccttgaagaacggacgatagagcatccaggcattaaaaatggcgaacaggcacatgcagaggtttttccagctgccgttggctgaccacgccgcgccgagcggcgccggcatcgaccacggcagcatcgccaccgcccgatcgagaaccccaagatgggttaaataccaggcgatacaggcatttatcagcggcacaaaaagaaacggcagcaggaaaaccgggttcatgataatcggaaagccgaacaatatcggctcattgatgttaaacagcgagggcagcaggccaattttccccacgcttttcagctgccgcgaacggctgcgcatcgccataaacaccagcggcagcgtcgagccgataccgccgatcagcaggtagaaatcccagaatccctgcaggtagatatgcggcagcgtagcggaaccggcggccagcacctgctggttttcaaacagataggtcatccagaacgggttcataatcccggtgataatcagcgcgccgtgaatgccgacaaaccaaagcaggttgcagataaataaagaaattaataccgcagttagggtatcggacgccaccaccagcggccgcaccgcttcgctaatcagctccggtaaaatgcgcccggtgctctgcagcagcagcgcgttgatgacgctaatagagagcagcaccaccagcagcgggatcagcagctgaaagccgttgcgggtcatcaccggcacctcttccggcaggcggatgcaccagcctttcttatagaaaaagcgcacgatttcaatagagtaagtgcttgaaatcagcgcggtaaaaatccccattccgccgaggaaaatattggtcgcgccgttgtcgcgaaagccgataaacagcaaaaacgccaggcagccggtcagcccgcagagccgctccggcagccggtactgcttggcaaggctggcgctggcgccgaaggccacaatcagcgccaccagcccgatagtcaattcaaaggttggcagcagaatgggccgcagctggaaatagaactggccgaaagccgatgcgccgttaatggaaacgggcggaaacaaaatcggcaccagcaaacttcccacaatcacaaacggcatcgccagcgcaaagctgtcgcgcatcgccgtaatgtggttattgcgcgtcagaacgttggccagcggcgccagccgctgctcgatgatatcgacggcaacattcatcaactgaatgttcataatcctgcctttaagaatagaggtgtcgccaggatgatcgcgcactcccgggtaaagtaaaagcccgccataggtgatcgtggtcacaataaataaatccacaaacggaagcgctttccgttttatatccgttatgactatagtcggcgcatccatctcatcaggagcgatatatgaaaaagataatgttgtgctgttccgcgggcatgtccaccagcctgctggtgaaaaaaatgatcgccgaagccgagcagcgcggtctgccggtggagatcaacgcctttggcgtcgcggaattcgatcaacaggtcggccattaccaggtggtcctgctggggccgcaggtgaaatacatgcagaaagatctgcaaaagcaggctgataaatacggtatccgcgtggaacccatcaatatgatggattacggcatgcagaaaggcggcgccgtactggatttcgcgctttcccttatcgataacaaaaactaaggaaagatcatgagctctctgtacgcgaagctgatcgccgtgattgaacagaagatcacgcctatggcgggggcgatcggccaacaaaaatacgtcacctccatccgcgacggttttattaccgccctgccctttatgatcgtcggctcgtttttgctggtctttatcttcccgccgttttccccggatacgacgtggggctttgcccgcgcctggctgcaattttcgctcgatcatcgcgatgcgctgatgctgccgtttaacttcagcatgggggtgatgacgctgtttatcgccgtcgggatcgccgccagcctggcaaaacaccataacctggactcgctgaccgccgggatgctgtcgctgatgtcgttcctgctggtggccgcgccgctgaaagatggccagatctccaccgcctacttctccggccaggggatcttcaccgcaattctggtggcgatttactctaccgagctgtacgccttcctcaagcgccacaatattacgatccgtctgccgcctgaagtgccggcgggcgtggcgcgctcgtttgagatcctgatcccggtgctggcgatcgtgctgacgctgcatccgctgaatctgtttatcgaagcgcagctgggcatgatcatcccggaagcgatcatgtcgctggtgaaaccgctggtggcggcgtccgataccctaccggcgattctgctgtcggtgctggtgtgccaggtgctgtggttcgccggcattcacggggcgctgatcgtcaccgggattatgaatccgttctggatggcgaacctgtcgatcaaccaggcggcgatggccgcaggcaccgcgatcccgcatatctatgtccagggcttctgggatcactatctgctgatcggcggcgtcggctccaccctgccgctggctttgatgctgctgcgcagtaaggcggtgcatctgcggacgattggccggatgggcgtagtgccgggcgtatttaacatcaacgaaccgattctgttcggcgcgccgatcattatgaatccgctgttcttcctgccgttcgtgctggtgccgatgatcaacgcaaccctggcctactttgcgctgaagctggacctggtgagccgcgtggtgtcgatgacgccgtggacgacgccggcccctatcggcgcctcgtgggcggcgaactggagctttagcccggtgatcatgtgcctgatttgcatggcgacggcgatggtgatgtatctgccgttcctcaaagcctacgaaaaacagctgctggagcaggagcacgctaacgcggcggcccaggccgaaagcgcgccgcagtccgcataattcatactattcagaggtttgtcatggaattagaagaacaggtaatgggtatcatcatcaacgccggccagtcgcgtagcctgtgctacgaagcgctgagctgcgctaaagcgggtgatttcgccgccgccgacgaaaaaatgaaagaagcggcgcattttgcccgcgaggcgcatttggtacagacccagctgattgaggccgacgaaggcgagggtaaaaccaaaatgaccctggtgatggttcacgctcaggatcatctgatgacctcgattctggcgaaagagctgatcggcgaactgatcgccatttaccgctcgcgaccgctgcacgcgtagggttccccctctccgggggagaggagatgacgtagcccgggtaaggcgttgacgccgcaacccgggaaaacggtaaatgctcatgtcacctggctggcttcccggctcgcgttgcgcttagccgggctacctgaactacacgcgtagcggcccgggaaaccgtcgaccacaattaaggacaaccatgctacatctgggtttagacattggcggcaccaaaatggaagccgtcctgctcaacgcggcgggcgagtgcgtctatcgccagcgccgtccgacgcataaagagagctatcaggcgtttatgcagcagctgctcgggctgattgcgaccgtccgcgactggagcgaacggccgtttactctcggcatcggcctgccgggggctatcgacccgcaaagcggcctgattaaaaactgtaactgtctggtgctcaacggccacgacctgcgtcatgacctgatgcgggaacttggtcaaccggtatggatggcgaacgatgccgactgcttcaccctctctgaggcggtagacggcgcgggcgcgggggcaacgaccgtattcggcgttatcatcggtaccggctgcggcggcggcgtcgcggtgaaccaacggctgctcagcgggcctaacgccatcgctggcgaatggggacacaatcctctgccgggctattgccccgagcgcgacggcccggcgcagccctgctactgcggcaaagagaactgcatcgaaagctttatctccggtaccggctttgcccgccgctacggcgagcaggcgccagcggaagcgattatcgccgccgcgcaaaacggcgaaccgcaggcgcaggcccactggcggcattttattgacgctttcggccgtagcctggcgtcggtaatcaatatcctcgatccgcaggtgattgtactgggcggcgggctctccaacgtcgggcaaatctatgagcagctgccgtcggcgatcgtcccgtatatcttctccgatagctgccgaacgcagatcaaacaggcccgcttcggcgacgccagcggcgtgcgcggcgcggcctggctgccggttctggccgacgctgaagccggtcggcggtagacacttttttcagcaggtatgctaagctaggcgaaaatattcagacagaaaatgccatgccaaccattgatgatgtttcaagattagcgaatgtctcccgagcgacggtatcccgcgtgctgaccggcaccaggggcgtgcgcgaagagagccgggaagcggtgctgcgcgcggtagaggaacttaactaccgcccgagctttgccgcgcaaaacctcgccagtcagacatccaatcacgtggggctggtgatcccggcgaacgatgatagcagcggcgcgcgcctgctgccgatgctctcgctagcgctgaaggggctgaataaaaacctgattgttcagtacgtcacggatgcggcggaacaggcggcggtcgtcgacgatttacagcgccagtgcgtggcggtggtggtgctcggcgccgtcccggcggatgcgccgcgcaacgtgatctcctttgaccgcttcagcattgccggggtcaataatcagggctacgactacgcttttgccaccgaaagcgcctgccgctacgtgatcggcaagggccatcgcaatatcgcgctgctcgttgataacgacagcgatgacgccagccgccagatgctcgaaggctatcgcaacgtcctgcaaaactactccatcccttttaaccggcagctgatgctggcggccaacgataacgttgaacaggcgctgctgacgctgattaacagcttcagcaaatactcggtgattatcgtgaaacgggaccgctacgccgccgaagcgatgcgcctgctgcgcgagttcaacgttgccgtaccgcaggaggtctcgctgctgagcctggaagattctcccctcgcctcgctgctcaatccgccgctgacctgtatctcctggccgctggagcagctgatggaaaactgcctgcagcgtatccgcaacctgatagacgagcgccccaccttctctcctgaagggcgcacgctggcgggccgcctgatcccccgccagtcggtggccgatctctcctgatttcagcgtccggccttccgcgtggccgggccttttcctctcccgccgcgggttcgcacgctaatcattcgcctcacatctaaataagaattattttcatttataaatagcttgtgctatataacatagcaatggctataaatgatgattaattaaccgcaacgttgtgagggaccttatgctgcacctgccacccctgaagcatctgatgtttgccgccacgctggcgctgctggccgtcgcccccgtccaggcaaaagagaaatttaaagtgattaccaccttcacggtgatcgccgatatggcgcaaaacgtcgcgggcgacgccgccgacgtcagctccatcaccaaaccgggggccgagatccatgaatatcagccgacccccggggatatcaaacgcgcgcagggcgcgcagctgatcctcgccaacggcctgaaccttgaactgtggttcgcccgcttttatcagcacttaaacggcgtaccggaagtggtggtcagcaacggcattcagccgatgggcatcagcgaagggccgtataacggcaaacctaacccgcacgcgtggatgtcggcggacaatgcgctgatctacgtcgataatattcgcgacgcgctggtgaaatacgatcctgcgaacgccgatgcctatcgccacaacgccgaagcctacaaagagaagatccgccagaccatggcgccgctgaaggcggaactggcgaagctgccgcaggataagcgctggctggtgaccagcgagggcgcgttctcctatctggcccgcgataacggcctccaggagcgctatctgtggccgataaacgccgaccagcagggcaccccgcagcaggtgcgcaaaaccatcgacaccatgaagaaagagcggatcccgactatctttagcgaaagcaccatctctgataaaccggcgcgtcaggtggcccgggaggccggcgcccactacggcggcgtcctgtacgtcgactctctgagcgccgccgatggcccggtgccgacctatctcgacctgctgcgcgtcaccactcaaaccatcgtccagggcatcaacgacggactaaggaaacaggcatgagtcacgagctgccgggcctcgcggtcaacaacgtcagcgtcacctaccgcaacggtcataccgcgctgcgcgatgcttcgtttagcgtcccacgcagcgccatcgcggcgctggtcggggtgaacggctcgggaaaatcgacgctgtttaaagcgctgatgggctttgtgcgcgtcggaaaaggcgatattgcgattctcggtcagccggttaatcgcgccctgcggcagaacctcgtcgcctacgttccgcaggcggaagaggtggactggtccttcccggtgctggtggaagatgtggtgatgatggggcgctatggccatatgggctggctacggcgggccaaaccgcgcgaccatgagattgtcgacgccgccctggcgcgggtcggtatgagcgagtaccgccaccgccagatcggcgaactctccggcgggcagaaaaagcgcgtgtttctggcccgcgctatcgctcagcagggaaaagtcattctgctggatgaaccctttaccggcgtcgacgtgcagaccgaagcgcgcatcatcgagctgctgcgggaactgcgcgacgaaggctgcaccatgctggtttccactcacaacctcggctcggtaagcgagttctgcgactacacggtgatggtcaaaggcaccgtgctggccagcggcccgacggaaagcacctttaccgccgaaaacctcgaactggcgtttagcggcgtgctgcgccacgtggtgctgagcggcgcggaagagcggattatcaccgacgatgagcggccgtttatcagccgtcgggcggcgggaggcgaaagatgagctggctactggagccgtttggttatcactatatgctgaacgcgatgtgggtctcggcgctggtgggcggggtgtgcgcgtttctctcctgctacctgatgcttaaaggctggtcgctgattggcgacgccctctcccactccatcgtgcccggcgtggcgggcgcttatatgctcggtctgcccttcgcgctgggggcgtttctttccggcggcctggcggcgggcagcatgctgtttcttaaccagcgttcgaagctgaaggaagacgcgattatcggcctgatcttctcctcttttttcggtattggcctgtttatggtgtcgctgaaccccacttcggtgaatatccagaccattattctcggcaatattctggccatcgccccggaggatattatccagctggcggcgattggctctatttcgatggcgattctgctgctgaagtggaaagacctgatggtgacctttttcgatgagaaccacgctcgttccattggcctgaataccaccgcgctgaagctgctgttctttaccctgctggcggcctgtaccgtggcggcgctgcagaccgtcggcgcgtttctggtgatttgcctggtggtgacgcccggggccaccgcctggctgttgaccgaccgcttcccgcgcctgctggcgattgccgtcgcgattggcagcctgaccagctttttcggcgcgtggctgagctactatctggacggggcgaccggggggattatcgtcgtcgcccagacgctgctgtttttagccgcttttgttttcgcgccgaagcacggcctgctcgccagccgtcgccgcgccagggaggcctcatgctgagcgcgctgattgaacctttccagttctcctttatggtcaacgccatactggtggcggcgatcgttgccgtcccctgcgcgctgctgtcggtgtttttggtgctcaagggctgggcgctgatgggcgatgccatgagccacgcggtttttccgggcgtggtggtggcgtatatcctcggtatccccttcgccatcggcgcgtttatcgccgggttgttctgcgccatcgccaccggttatctcgacgataacagccgcattaagcgcgatacgatcatgggcatcgtcttttccgggatgtttggcgcgggcctggtgctgtacgtgtcgattcagtcggaggtccatctcgatcatattctgtttggcgacatgctgggtatttccgccagcgatattgcgcaaacgtcgctgatcgcgctggcgattgcgctgataatcgggcttaagtggcgtgattttctgctgcacgcctttgatccgcagcaggcgaaggccagcggattgcgctgcgggctgctgcattatgggctgctgtgcatgattgcactgaccatcgtggcgacgctgaaagcggtggggatcattttgtcgatttcgctgctgatagcgccgggggcgatcgctctgctgctgacgcggcgttttgtcagcgccctgctgctggcggtggcgatagcgttaagctgttcgctgggcggcgtgtggctgtcgttttatctcgacagcgccccggcgccgaccattgtggtgctgtttaccgtcctgttcgttatagcgtttgtctggacgtcggttcgcgatagtcaaaccacggcccgttccggcgaagccccgggtcgcggctgacgccttacccgggctacagaccgcacgaattgtagcccggctaagcgccgcgcgagccggggagtttattgcggctttttgggccgatacttttccggtaactccggaaccgggcgtttgtcatcgatcaggtggcgaatcgtcaggatcgggtgccgccagagcatccgcggccccgcccagcgcataatctgcttcatctcttcgcgtttcgcgggctgatagcaatgcaccgggcactgcttgcaggcgggcttttcttcgccaaatacgcacttatccagccgcttgtcggcatagccgttgagcgcctgatagtgttcggcgtcgtcgcgggcatccgggcagcggcgctggtagagcgcaatcatgctgctaatggtctttttttcccgcgcaatacgtttgcccgccatcacctgttccccccgataaagatgcattcataatacacattcagagaggacgatgcagccccatactccctgaggattatgccggtttatccacgtgccccagcggtttttccgggaagcacacatcgcgcacccggcgcttgagctccgccgcgtcggggaaaccgccatcctgcttgcgctcccagatttgcacatcatcaacggccaccacgaagatcccgccggttcccggaaccagcgtgaccgaagcgatatcggtgctaaagctgtgcagcagttcctgtgccatccagctggcgcgcagcatccagttgcactgcgaacagtaggtgatggtaatcgcggctttatggctcatcgtcttctcgctgtcggtaaaagggcaaattgtaaacaacttgcagattaattgaagaatacatgattattttgttgcaaacgataatacctatcattaccattcgcaatcaacaagcatggagaaaaaacgtccagtaacggaataacgggacacacctgcactctggaagtaacgcgtgagccaatactaataatgattaaggcgtggctactatgtataactccactcaatcaacagcatggttcaagaaaagcctgctggtgacttctttgcttacagcactttatcagacttccgccggggcggctgataccaccgcgaaaaccaccagcagcgcatcgactgatgacagctcggaacggatgaccgttaccgcgccggcgccgttgctgaaagcgggcagcgaacattcgatcggcgctcaggagctgcaggataaaggggccaacgactttggctcgatcatgcgctacgagccgctcattagcgccaccggcgccagcggcggttccggcaacggcaaaagcggcttcgaccgcggcggctataccggctacaacatacgcggcatggagagcaaccgcgtcgggatcgatgtcgacggcatcgcccagccgaacgccaccgggcgcagctacgccagccgcgcgggccttaataccttcggtatgggccgcgactatattgacccctatatgtacggcagcatcgatattcagtccggggcgacatcaacggaaaccgctaacagcgccatcggcggcaacgtctctttccgcccgaaatccgcggatgactatctgcatccgggcaaaaccagcgccttcggctaccgcagcggctacgactcgtccgatcgcagctggcacaacggcgtcaccattgccggcggcgacgagaccctgcgcgggatcttcgtctacagccgtcgcgacggtcaggagacggaaaataacagcgggaccgttgattcctatccggcaaactggcactcggacgcctttatggcctccgggatctggcagccgaatgacgaacataagttcaccagcaccttcgattattaccataaaacgaaccacacgcattacgacgcctgggactccagcggcaacagcgttatcggtacgtcaaaccagaccagccagacccgccgctggggcctgagcctgaaagacgactggacgccgatgaacgactatatcgacagcgtatcgaccaaagtctactaccagcataccgaggcccatgactggacatatatgccggacagcgtcacccgcgcgatgcaaacggtgagctccgactacgataccgacacctgggggattcagagcgcgctggcgaaatcgataggccgccacgatctgagcgccggttttaacgccagcacgacgaaaacccagcggccgttaacccagtcgccaaccccgagcgcctatagccagattatgcagccggacgccgacagccgcggctatatcgtcgccggcttcctgcaggacaaaattaacttcgacctcgacggccataactttgcggttatcccgggcattcgcgtgatgcatcagtcgaccaaaccggaaaacgtctccgatttggccaacaacagcagcgtgctgaccggttccgacgtgtcaaatctgtacggtaagaacgctgatacccaggcgctgccgtcgctggtcttgcagtacgatatctccccgcgcctgatgacttatctgcagtatcagcgcggcgcgcagttcccgaacgccagccagctgtacggttcgtggaacctcggctccagctacgccggacgcgcccagtatgcgctgatcggcaacaccgatctgaaaaccgaaaccagcgataacgttgagtgggggatgaagggcgaagtggcggaaggcatcaccatgcgcaccgcgctgttctacaacacctataagaactttatcgcctatacccgctacacccgcgccaataatccgacgcagttcactaacgtaccgtcgaacatctacaccatttaccaggcggaaaaccgcgataaagcgtacatctacggcggcgaaatcagcgctaaattcaactttggcacctggtttgaagaggttaacggcctgagcgccaccctcgcttacggctatagtgaagggcaatcgaaatccagctacagcggcgataagtacgtcgacctcgatagcgtcgcgccaatgaaggccatcgtcggcgtggcgtgggacgatccggcaaaagtgtacggcaccgcgctgaccgccacctttgttaagggcaagcgcgccaccgccaccaaccgcgaaagctataccaactccggctccgcgattaccgattcgaccagcgaatatatgcgcgttccgggctacggcatgctggactggaccgcgtactggcaggtcgcgaagaacgtgcgcgtgaacggcggcgtatacaacattaccgatcgtaaatactgggattatctgagcagccgcaatatcgaaacggcgacgaaccaggacgccaacgacagagcgctggcggtgatgcctggccgcacctggcagctgggcgtgaacgtcgatttctgaccggccaataataagaaacctgctccccggccgcgcgccggggaaactcatcgtagagaaggatgtgaattatgcaaaacacccaaccgcaacataccccgctgtggcagcgctatctgaccacgaaagcgcaatcctccgcgaaatacgcccgcgatatcgccgccgaaatggggattagcgaagccgagctgaccgaagcccgcctgggctacgatgccgtacgtctgcaggacgacgcccgcgccattctgacggcgctggaaaccgtgggggaaaccaaatgcatctgccgcaacgaatacgcggtgcatgagcaggtcggcgaatttacccatcagcatctgagcggccacgccgggctggtgcttaatccgcgcgccctcgatctgcgcctgtttctcagccagtgggccagcgcttttcgcctgaacgacaacggccgccagagcatccagttcttcgatccgcacggcgacgcgttgctcaaggtttacaccaccggcaataccgacatggcggcctgggatgcgctgattgccgggcatacgcagcaatcgcctgccccgctggcgattcgcccggccgaaccgctgaaatatgccgactccgccgacgcggcggcgctggaaaatgaatggcgggccatgaccgacgttcaccagttcttcggcctgctgagaaaatatagcctgtcgcgccagcaggctttccgtctggtcagcgacgacctcgcctgccggattgacacccagacgctgccgggcctgctggaaaccatccgccaggatggcaacgagatcatgatttttgtcggcaaccgcggctgcgtgcagatcttcaccggcgcgctggagaaggtcgccccgatgcgcggctggctgaatatcttcaaccccgcgtttaccctgcatctgcgcgaggagagcgtggatgagatctgggtgacccgcaaaccgacctctgacggccacgtcaccagcgtcgagctgtttgccaaagacggcacgcagatcgcacagctgttcggtcaacgcagcgaaggccacccggagcaggcgcagtggcgtgcgcaggtcgatcgtttgaccaccgaaggtctactcgcatgaagcgctggctgatattacttgcggcgtttccgctgttggccagcgccgccgccgagcggattgtgtcactcggcggcgacgtcacggaggtagtttacgccctcgacgcccagcggcagctggtggcaaaagacagtaccagcacctggcctgccgccgcgcagagcctgccggatgtgggctatatccgccagctgaacgccgaggggatcctctccctgcggccgacgctggtgctggccagcgcccaggcgcagccctcgctggtgctgaaaaaggttgaagagaataaggttaaggtgatcaacgtcccgggcggctacgacctgccggcaatcgaggcaaaaattggcgtgattgccgacgcccttggtaagcagagcgaaggtaacgccctgcgccagaaggttcatcagcagatcgcgcaaattccgtcgcagcccgtgaacaagcgggtgctgtttattctcagccacggcggcatgaataccatggtggccgggaaacaaaccgcggcggatggcgcaatcagggcggccgggctgcaaaatgccatgcagagcttcgaccattatcgcagcatgtcgcaggagggcgttatcgccagtacgccggacctggtggtgatctccgccgatgggctgaaaggcatgggcggcgaagccgggctctggaagctaccggggctggcgcagacgcctgcgggacgccataagcaggtactggtgatagatgatatggccctgctcggctttggtccgcgcaccccgcaggcggtgctcgcgctgcggcaaaaagcggagcagctgccctgatgcgctcccaccctgcccgtcatctgtggttaatgacgctgctgctgattgtcctgacgctgttagccacgaccctgggcgccatgcgtctgccgttggccagcctgctgccctccggcgatgagattctgagaaacatctggctgaccattcgtttgccgcgagtgctgctggcgctgctggtcggcgccgcgctggcgctctccggctgcgtgatgcaggggctgtttcgcaaccccctcgccgatccggggctgttagggatcagcggcggcgcggcgctggcggtcgcctgctggctggtgctgcctctgtcggtgccgctgctcgtggcgctgtacgccccgatgctggcggcgtttatcggcagcatggcggtgatggtggtgatttttatcctcagccgggcgggagacgcctcgctttcgcgcctgctgctggtcggcatcgccattaacgccctgtgcggcgcgctggtcggggtactggcgtggatcagcaacgatacccagctgcgccagctttcgctttgggggatgggtagcctcgggcaggcggaatggtcgacgctgctggtggcggccacgctgatgatcccggcctctctcgtggtgtgggcgatggcttcacggcttaacctgctgcagctgggcgatgaagaggcgcactacctcggcgtcaacgttcgcgccctgcagcggctactgctgctgtgcagcgcattgctggtggcgtcggcggtggctatcagcggcattatcggctttatcggtctggtcgtgccgcatttgatgcggatgtggctggggccggaccatcgcggcctggtccccggttcgctgctgtgcggcgcgatgttactgctgctggccgacacgctggcgcgtaccgttgccgcccccgccgagatgccggtcgggctgttgaccagcgtactcggcgcgccgtggtttctgtggctgatttttcgtcgggagaaagggacccatggataaccgctatagcgcgcgttcgctgtcgctgcgtctgggtaaccggcagattattcatgatgtttcgctccagctctgcggcggtgggacgacggcattgattggccccaacggcgccggtaaatcaaccctgctgcgcctgttaaccggttatttaacgcccgacggtggcgaacgggtggtggaaggccgtccgctggagagctggtcggcagaaacgctttcccgccggcgggcggtgatgctgcagcgtacccagcttcacgccgactggccggttgagacggttatcgccatgggccgttcgccgtggggcggcgtagcaaatgaggagatgatccgccgggtgatggaagagaccggctgcgatcatctggccgggagacgctacccttccctctccggcggcgaacagcagcgggtgcagctggcccgctgtctggcacagctgtggcgcgatggcgcccccgagggctggctgtttctcgatgagcccacttcggcgctggatctctattaccagcagcacctgctgcgcctgctcaaacgcctgacccgcagcagccggctgcacgtctgtatagtgctgcacgacctgaacctcgcggcgctgtgggccgaccggattctgctgctgtatcaggggaagctggtagccgagggcacgccgcaggaggtgatccagcagccgattatcagccgctggtacggcgcggaggtcagcatgggggaacatcccgatgcggccgttccgcaggtctatctggcgccgtgaactgatagcagtgttgcgccagaatagcccgctgccagccaataatcctttcccggctcgcgctgcgcttagtcgggctataattcgtgcggtatgtagcccggcgaaggcgtcagccgcgcccggaggactccataagggcgcacgttgtcagtaaggcattgacgtccgttccgttcgtgattagccggttacggtcttgaagccgtgccatccggcgtccgcgccatcgtccatgacggaatgccaccttcgcacggatacttcgccgctttggcctcatcaaggtcaattcccagacccggtttattatttaggtaggcataaccgtggtctatctccgggcatcccgggaagacatcgcgcaaggcatcattcatcggcgtgtactcctgaataccgaagttgggcgagctaagatcaaggtgcatgttcgcgcaaaccccaaccggtgagatatcaccaggcccatgccatgcggtgcgcacaccgttaaactcgctatacaccgccagtttcttagctggcgtaatcccgccgatagtgctgacgtggcagcggatataatcgatcagcttattgtcgattaagggtttccactcattcacattcacaaacagctcccccatagagatcggcgtggaggcctgctggcggagcattttaagccagtcgatattttccggggcgacaggatcttcaaggtagaagagctgatattgttcaagcgttttggcgagatgaattgcggttaccggcgtcacgcgctcatgcacgtcatgaatgaactcaacaccgaatcccagcttgttgcgcagatggtcaaacaggcgaggaacgcttttagcataagcgtccgggtcaaaatagattcccggcgttttgctgcgcggggaacgcttcggttggatatttttcgcccgcgccagttgggtcgcaatgagcttaagatcgtcggtacccgcgccgccgtacatccccatctgacagcgtacgtactggtatccctcttccattctggcgcggatattgtcctcgacttcaacttcgtccccgccatcggtatggcaatacagcggaatgccgtcgcggcatttaccgcctaacaaatcatacaccggcatgcccgccagcttacctttaatatcccacagcgccatatccacaccggatagcgcgttgttcataatcggtccgctgcgccagtagccgctgaccgcgccagactgccagatatcttcaattcgcgtgggatctttgccaatgagaaaaggcgccatgtattcatctatagcgcttttcacggcgaagattcgctgggtaaacgtcgcacagcccaagccatacaggcctggctcgttggtttcgaccttcacaaccgccagatcaatgccgccgggcgccgtcagaatcgttttcacgttggtgattttcaggttactcactttaactcctcagttcacagaattaactgcctgccatgctgtaagcgaatatcatcgccacatttgtaagttgtcctacaactttgcgttgttataacacgacgattagcggctcgtaacctcaatctttatttctgtgatcgcgatcatgccagcaaacaaaaaagattaaaaaaacaatatatacaataagttatataaaacacttcatttaaacaggagttgtgtttgtgatctatattgcaaatttatttttagcttattgcttttgcctcaccaaaaaatcaagcttaaataagacagtcgtcatacaagtaaaattaagcgaggaaataaaaatgagcgcattattcgatttaacgggaaaaacggctctggtcaccggttcggcgcgcggtctggggtttgcctatgcggaaggcctcgccgtggcaggcgccagagtgatactgaacgatattcgcgaaacgctgctggcagagtcggtcgatgtgttggcaagtaaaggctacagcgcgcacggcgcggcgttcgacgtcaccagcgaagatgcgattgagaaagcctttagcaaactggatgcacagggcattcacgtggatattttgataaacaacgctgggattcaataccgcaagccgatggtagagctggagctggaaaactggcaaaaagtgattgataccaacctgaccagcgcatttctggtctcgcgcgccgcggcaaaacgaatgatcgcccgccggtccggcggtaaaattgtcaatattggttcgctaaccagccaggctgcacggcctaccgtcgctccctacacggcggcaaaaggggggatcaaaatgctcacctgctccatggcggcggagtgggcacagttcaatatacagagcaacgccattggtccagggtatattttgaccgatatgaataccgcccttatcgaagataagcagtttgatagctgggtgaaaaacagcaacccatcgcagcgctggggccgcccggaagaattgattggtactgcggttttcttgtcctcgaaagcctcagattatatcaacggacagattatttacgtcgacggcggctggttggcggttctgtaatatcgcggtgcattcagcatttttgcctttaaaattttcggcgtgcctgaatatttactatacgggtctgccgatatcacacaggtataattatgaaggcttcaagatcacgactctttattctcacattgttatttattgtcaccgctattaactatatggatcgcgccaatcttgcagtcgcaggctcaaatatccaggatgactttagtttaacaccgacgcagctcggtttacttttttctatgttcacctgggcatatgcagctagccagatccccgtaggctatattcttgacagaataggctcccgcattctgtacggtggcgctattattttatggagcgtatttacttttatgatgggcttttcgtcccaccatcttttctcgacagcgacggcatccttcgtcatgctattagcttgccgggcgttaattggtgtcgccgaagcaccgtcattcccctctaatacaaaaattattgctacctggtttccggatcatgaacgagcaagagctaccgccatatactccagcgcacaatatattggtctggctctactgactccagcgttgtcttttatcgtcgccaattatggttgggaaatgtcattctatttatccggcggcgcgggaatactgtttggcatatactggctgatatattatcgcgacccgcagcacagcactacggtgaatcaggcagagcttgattacatcaaggctggaggcggctatggctcagagaaccaatccgccgtcagtacaaaaattggctggcaggatattaaattcttcctctgccggaagaccgtctggggcctgttcattacgcagtttgcctgttcctcaacgctctatttttttctcacctggtttattgtttatctggaaaaagggctgcacctttccatatcaaaagcaggggttggtgccatgctaccttatattatggcaatgtttggagtgctatgcggtggcacactcagtgatttactgctgaaaaaaggaaaatccagaacttttgcccgtaaattaccagtaatggctggtttattagttacaatgattattgctttagttaacttttttgaagaccagccgattattgctattgtgatactttccattgcttttttcgccaatgccttttcaaatttaggctgggtagtgtggagcgatgtcattccgcgaaatttcctcggaaccatgggcggttttttaaatatatgcggaaatctttccgggatcgtcagcccgattgttatcgggatcattcttgagcgcactcaaaatttccaatatgccatgtggtatatcgccgccgtcgccggactgggtctgctggcctatatctttctggtaggtaaaatagaagttattttacccggagaggctaatccagatagccgcgataataacgcattgcacccggcaacaaataataaatcctgaggtaattatgaacactgagaaaataacctgtaacgcctgtctggcacatgctgaaaaagacgtgcggtttgcaacacgcgatattgaatacggcaagcatgatgtgttggttaaagtggcctacggcgggatctgcggttcagacattcactattatcaacatggtcgcgcgggtatgtcgattttgaaacaccccatggtcatcggccatgaatttgttggcgtggtggaaaaatgtccggcagagagcggtttaaaggttggtcaaaccgttgctatcaacccctcttgcccgtgtaaccaatgtgagatgtgtctttcgggcaaacaaaacatgtgtagctcaatgcgctttatgggaagcgcgcagtttaacccgcacgtgaatggcggcttttctgaatacgtagcggttaagccggaacaatgtattgcatacgatagtcgggtgccggccaacgtcatggctttttccgaacctctggccgttgccattcacgcggtgaaaatggcaggccagttaattggaaaacgtgtactggtgattggggcaggccctatcggctgcctgattctggcagcggccaaaagcgcaggcgcctctgatgtggtggcctgcgatttaagcccgcggtgtctggaactggcgcaacagatgggcgccactgcagtgatggatcctcgggatgaaaagcgcagcgcgtattatcagcaaaacagaggctacttcgacatagtcttcgaagcctccggcgcacctgcggcgatagcatcaacggtggatttcacccgcccaaccggaacgattgtacaagtgggtatgggcgtaagcccgataacctggccggtctctgccatgctggtcaaagaaattaatctggtaggctcgttccggtttattgacgaatttactatcgcagtgcgctggcttgaagatggccgcattaatccgcgcccgctaattagcgccgaattctcccctgccagcattgaacaggcattgataaccgcggcggacaaaaatatctcagctaaggtcctcattcgctttgaataaccgcgacaagcgcccggtcgggcgctttgttcttaaaagtgaatgttatacaatgctgcaattctcagcactctaccggacagcgatcttgagcataaaatccattcaaaaacagaacgttgtaaatgaaatttatgatcagatcagcgcaaagctgctggatgggagctggccgccgggtagccgccttccgtctgaagcggagctgaccgcttcctttaacgttagcagggtcagcgtgcgcagcgctgtccagcgctttcgcgatctcggcatcgtcgtcactcgtcaggggagcggtagctacgtaagcgatcactttacgccgcagatgctgagcaacgatcctcgtcccatcatgcatcttagccgcgaagagtttcacgatatgatgatcttccgccagaccgtggagttcaaatgcgtggagctggccgttactcatgccacggaagaggacattcttgagctcgaacaggcgctcaacaatatgctgattaacaaaggcgactacaaaaagtattcggaggcagactacgctttccatctggctatcgtcagggcctcacacaacagcgtcttttataacgtaatgaattcaataaaagatatttattactattatcttgaggagctgaatcgcgcgctcggtatcacccttgagagcgtagaagcccatatcaaagtctacatgtcgataaaaaatcgcgatgccagtacagcagtgaaagtacttaacgaagccatgtcggagaacgttaccgccattgataaaattaagtcttcaaccagcagcaacaattgattaatcgccctcccctcttattacaactttccgttgccggtatcgctaccgacaacggcggttttatagtgcgttagaaaattgcccgatacagcgctttaatctcttccagattagtgtcacgcgggttgccgccggtgcacacatccgccagagccgccgccgcaagggcatcaatatcctcttctttcataccgacatcgcgcaggcgcgccgggatattgacgtcgcgattcagctgcgccaccgcctcaatggctgcctgacgcgcttcggcaatcggcagggttgacgcctgcttgttgccgagggccaccgcgatgtcgcgatatttttcgccagtatattcggcgttgtaggccatgatatgcggcagcagcaccgcgttagccacgccgtgcggcgtaccgtagaatgcgcccagcgggtgggccataccgtggaccagccccagaccaacgtttgagaagcccattccggcaatatactgccccagcgccatcccttccgcgccctgcgcctcgccctgaacggaagcacgcagcgaccggccaatcacctcgatagccttcagatgcagcatgtcggtgagttcccatgcgcctttggtgatgtagccttcaatcgcatgggttagcgcgtcgacgccggtcgccgccttcaggctggccggcatgctgctcatcatgtcggcatcgatgatcgccactaccgggatatcgtgcgggtcgtagcaaacaaatttgcgccgattctgtacgtcggtaatcacgtagttgatggtgacttcggctgccgtaccggcggtggttgggatggcaatcatcggcacggcggcgtttttcgtctccgccccgccttcaagactgcggacgtcggcgaactccgggttattaatgatgatgcctatcgccttacaggtatcctgcggtgagccgccgccgatagcgatcaggtagtcggcgcccgactgtttaaacgtctctacgccctgctgcacaacctcaatcgtggggttcgggaccacttcatcaaaaatgctgtaaggcagcccggcttcgtcgagaatagcaaaaacttttgtggcgacgttaaaacgaatcagatccttatccgtgaccaccagcgcttttttgaagccgcgttttttaacttcatcaacgatacagcgaatcgaacctgggccaaaatacgaggtttcgtttaaaatcattctgtaagccatttgtgctccctcaattcgagtgtttgataaccataatatttagccctacagtaacgtgactggcgcagccattttattaattcatatcaattaacaccctaattgcccggcacgctgttgcagttaattaacccatcgcacattagtcatgagatctgtccagcatactggacatcagcgagcatcaactttaatgacgcccagggacaccaacagtaatatatacccgtcatacttcaagttgcttatgtgctggctacgctcattccccccagtcacatagttatctatgctcctggggactcactcccttgccgcctttaagcaactcgaattatttagggtatagacctgagaaagatattatctcatgatggatattattgaactggatcacattattttatcttttactgccgatacgcattcgtatagccaaaaaggtatctctgcagaagcacaacagaaacaggagggactcatgacgcttaagccggcgcacgttagaaactgccttcgattattctctatacctctttcttatccgtctccttatctcgccgcccgccaacatcaagtgcatcagatggtcatatcgtcgacttaacactttagaaacaaaagcatcatttcctcaacaaagcggccatcccaggccgttggctatcgattaaaaacctctaataagaattatctgtcattattcataattgcttatcggcctgtcgatagcaaaacatctttttcttaagagtcgcgagctctcattattaagaatattctctatcatttgcgagatattaattgttaaaaatctaaaaacataaaaaaaacagtcaagatctctatctttattgcaaacaacattacctcttgttaatatggcccttgacatatattatttattataaaaataccatttatgatgcttattaatttttattctaatcacctgaccatacttctccaacggcagcagtaaatgtctgactttataaattgacatttcgcacttgtccgctaactcacgagtaagtaacccttcaggttcatgttcttttaatacataaagaatatactcctgctctggtacgattaccccggcgaatttattgatgcccattgaattcatcaacactcgtaaattctcaactgcggttacagaattttgatgcgaatgcggtgtacaggacgaaaatgaaatcttcatgagtcagctccttctgtcattaagtacacggcagtatggattgaccctacgaaaacggcaacattagctttaaatttcaacttaaacagtacatttatctgaaattcacttttttttatgataaaaaccctgatataaagagtgaatttttaattccgtgcggagataaaaatgcggttcgatatagagggatttattacatttgatactgaggaagcatccctggtcaatctgttgactggtgattgtattgaactctctgctacttccactcgcctcctgaccaatctgttacaataccgtggggatattatctctcgcgttgacatttttcagtcggtgtttgaaaaatatggcgccagaccttctaatagcaacctgaatcaatacatctcaacgctgcgtcgcagccttgcggatctgggcgttgagaaaaatgtgattattacggtaccgcgaattggctttaaaatttctgaggaagtcattatcaccagcgacaatgattactcctcctctttcactctcccgacgctggccccagaacttcccagacgtagtttgctgtggcaacaccgcaaagtcgccattttatttatcccgttggtgatagctttgatgctgctttcacagttttttacccatcaaaaacagtcccctacagcgatttttactcaggataaatgtattttttatggcgcaggagcgctacgcgcgggggaaatactaagaaataaaaagctgttcccctcggggctcgattgttctacacccaagaaaatttatcttttcaaccgacaattaaatcaggaacaggacttaggtatttatatggatatattcatactcaaatgcgatatgaagtaccagcagtgccacagttactactataaggaaataaaaaatgcgtaaatacgcttttatcgcgctggcctgtacgctaacgctggcattagcttccatcctgtacatttgtttcaacagccatgacgctttctcctgtaaatcacaatacgatcttacagaggaaataaatgagaatgttctccgctcccagggcttgctatccgctgagttttccaaccatcatcttataatcaaccttgagggattgctcaccagcgcgggagataaatacattgtctcgcgcaccctctccatcacattaaaaaaaaagcgccgctgcagagcatcttttttatattgctgattcgcaaaccactcgccacaacggtgataatacgcctgataacatcgcgcaaaaaatcctctttgacaaccaaactaatgatagaatcatctatatcaatcgcgttaatgatgatactattttattcggtaaccaaacgttcccacaatatggttgccagcgtcaaaaaaacaatcattgattgagattcatctcattaattttaattacaaagatatcatgacgatacatttactaccgacgttagccagcatcgctaatatcattgatatgattaacccacggctaaatctgcaccatgtcagaacggcgtttatcgcatcgcatctggcaaatttagtcaatttttctgcggcccagcggcgtaaaaccattctcgccgctcttattcatgatgtcggcggattaaatgaaaagtcgcgccttgagccgctcaactacatcgataatgaacataataatcacgcgctaatcggcagcgagttgcttagccgaattccgctgtttcgcccgctcaacagaatcgttcgctatcatcacacccgctggcgcaacggtctggggcgttatattgaaggtgagcgggtacccgaagagagccatctgctcttcttcgctgaccggctggatgtactttattgcgagcaccgtaccgaccatagcgcctttttaagcaacaagctggtcgacatcgttgctgccggagctaatattttttataaacaggagtatattcaggccttcagaacgctctccgccgatgaccatttctggtctgtcatggcatccaccgactatcgcgattacattaacgcgatctccggcgttcataacgacaccctctctttacacaacctccgcgatattgctgagctggtctcttttattatcgatcaattcagtcagcagacgccctggcactccgccgccgtcgggcacattgccggttatctggcgacaaaaatagaaatgagcgcgacgcaagcgctgaaagtagaaattggcgggttactgcataatatttcctgtctggatcatagcccgccgtcaaaacgcgttggtgcgtcagacaacgcccggcacacgctttatcctattgaaggtattgatgatatttctgagtggatggccatgcaaaatggccccgcgccgcttcaattacccgaggaaatccttacgccagaagccgtgcttatcgcggtgagccgacgggtggtccatgcgctaaatagaccgaaagcggaagagaagtcgctggcgcagttaataaaaaataacccgggagaggaaattcccccgtttatgttatccctgattgcccaatattccccacaaattatccaggtctatcgtgcaaccgctggcgaaatacaggcgttaatgaatcgcattgcgcaactcacacattccctttagaggctaacccggcctaatcacagactcaggcgctcaatccgccgtccagaaccagggtttgcccggtcatatactggctcccctcaccgattaaaaacgccaccgcctgcagcacatcatccgtttcgcccaatcggcgtagcggtatcgcctggcgcatctcttttaatttttgcgcgggtatctcttccagcatctccgtacggatcaggcccggcgccaggcagttaacccgaatgccgaaacgcccgacctccagcgccagcgagcgcgcaataccgctcatcgccgctttactcgcggcgtacgccgtctgccccacgttgccctttaacgcgctgaccgacgacatcatcacgatggagccccgccgctgcgtaagcatcgccggcagcagcacccggttccagttcatcatcgcgatcacattggtgtccaacacttcgcgccagagcgcggcgtcctgatgaatatgcaggccatcgcgagctatcccggcattgtgaataatcgcttccggtgccccccgctcggccagtagcgcctgcgcaagccgttcaacccgcgacgcgtcgttgccgtcgcagacgtatccctgcacccggtgggcggagttttcgctcgccgcccgggtggcgttaatcgcagcctcatcgcggccggtaaagaccacgttccggctttgcgccaggccggtgaccagcgcccggccgataccgcggctgccgccggtcactaatatccattgttgcgtcatatcagttacctgactctttgctgatgtgctgacacagttcgcccagggtgatccccggattgtgaataaaccagtccgcctccagggtgatattgaattcacgttttgccagcaccatgagctcgacgtagtccaggctatctaatttcagtcgaaccagcggcgtattctcatcaatctcatccggttccaggtctttcgcatcgcaaatcatttcacatactttttgcagaacttcatcataggcagtcataaattatccttaattatcaattaggcacggggccaacttttagcgtgaccacgttggttattatcaggttatccagctgcgccgccgcggcgatgcgcaccagcgccccctgttcgacctggcccaccaccagcgagggcagcagccagagcgccagagattcgggccaaatcggcgtcgctttgcccgcgagacgagcatcaaacaccacctcctggtgggtttgcagcaccggatagcgggtaaatatttgctgcaacgaggtttcccccggcccgagcagggaggcgatgttctcctggcgcagcagcgcgggatcgccaatcagctggcggaacagcaaggcgtcaagaaactgccactgcgccaggtcgggccaggcggcatggaagcacgactgcagctcgcgcagcgtctttggcgcaatcgtgcagggctgtttacccaccagcgattccggcccggccgccgtgctcatctggcaggagaggcagagttcgccattgtgcggattgctgaccgaagtggcggacaaaaggcgatttttggctaccccgggcgttaacagccagtcggtatcgcaccatattggcctgcgcaggcgaacctggcattttacgtaacgctcagggcggtacagccgggagtgggcatcgcgcttcacgtcgagcagcgcgcgcattccgtggacgctcagctgtcccgcgcccatctcgcgcgctgccgcgaggtcgaagtgaatcgggttttcgtcgccggaaaacgccgcccactgccgcgcgtcggcaagggtgtagtgcagcagcgtcacgcgtgtttctccagcaccagcgcggcgttcgcgccgccgaaaccaaagctcagattcagcgcccgatgtatctccccctgacggtgcccttcggcgatatagtcaagatcgcactgcgggtcaggctgggttaaatgggccgtcgcgggcaggatccccgccgccatcgcctgcaggcaaacaatggtctcgaagctccctgcggcggcaatcagatgcccggagtaggctttggtgctggaaatcgggatgcggtacgcctcgtcgcccagcgcctttttcagcgactgcgtttcgttgagatcgttgagcggcgtggaggtgccgtgggcgttgatgtaatcgaggtcggcaggctggagatctgcgccgcgcagcgcccaacggatggtctgctcgcgggctacgcagtcctccgccggggaggtaaaatccaccgcgtcggagaaattagcatagccggtgacctccgccaggatcgtcgccccgcgcgcgagggcgctctcgcgctcctccaggcacagcaccgccccgccttccgaaagcacgaacccgctgcgctgcaggctgaacggacagctggcccgctccggcgactccgtttcccggctcagcgcgccgagcacatcgatattccagatcgcgcaaacgctgtttagcgattccccggcgccggcgagcagcatgctggcgcggccaaagcgaatcgcatcataggcctcgccgacagcaatagtgccggtggcgcaggccgcgaccggggtattttgatagccgcgcaaattccacagctggctacaggcggcggtgctcacgttgggcatggaaaaaaagcagctaaagggcgaggagacgccggttttctcaaactcgggtaccgccagatagctttcatccagccctgcccagccggagccgatgatggcgccgcacattagcgggtcataaaacgccgtgggagcttcacccgcaaaggccatcgccaccgcttcccgcgcggcggccagcgccaggcgcgcgtgacgtggcagacgccgacgaatcgcggcgggaacccccttaaggctgggttcattcgccacctgaccgataaaatgcgtgtgaataccgttcgcggagagatccacatagcggtagccgcgtcgataatccatgatggcctgccagctttcggcggcgctatcgccgaggggagtcaccgcgccatagccggttatcaccacgcgataaggggagttactgtgactcattctgggaagtcctctgttgcgggttaatgcctccctgcgccagccaaagctgcaaagtggcataaagatagtcgtactggttctgcgccaggctgttctgcacatcaagcagcgcgtcctgggcgttcagcagagtctgataatccacagctcctgagcggtagcggctcccggtgagcgccagacgctgctcgcccagctgcagcgtttgcagcagacgatcgcgctgctcgtcggcgttaagccgcttctccatcgcgttgtccacctccgacagcgcggtataggcggtgcggcgaaagttcaccgcctcctgctgtaccttcacgctggcctgctccacggtgagctgtaccgtgttccactggataaagggcgcggaaacgctgctgcccacggtgcgcagcgggtcgttaaaccactggtgaaagagctggcttccggcgcttagcgttccctgcagcgagagcgtgggatagaaactcagccgcgcggcgtctgagcccgccagcgccgcccgcaggcgggattccgccgcctgcaggtccggccggctggcgagcgcggccagcggcgtggcgttggcaatggcgatatgctgacgcacatccagcgcggaggactcatcggtgtgctgggccggcggtctgttgagcagcagcgccagcgcgttacgggaaatcgcccgttgctgcttcaggctcagcagctgattctgccggctgatgaccgtctgtcgcgcctgcagcacatcaagcagtcccactttccccgctcgctgccaggactcaatctgcgccagcgtctgcctggcgatatccagactcgccgcctgatacgtcatttgctggttcagcagagcgatgttccagtacagctgcgcggtggtgtcaatcgtcgacaggatcgtcgcccggtagtcctgctcgctggctatcgcctcccattcgctctgctcccggatccgcgccagcttgccccacagatccagttcatagctcagggacagtgaggcgctgtagctctcctgcgaaccgccgctgttgagcggttttgagttactgccggagccgttgaggctcgcgtcggggctgatattggtccgggtgagcccagcggaaatacgcgcctgcttaagggttaaggcggcagcggcaagatcgttattgctttccagcacctgccccaccacccgcgacagacgttcgtcgccgaaacggtcccaccagcgctgcgttttctcctgcgagcgcgcgatgctgtctccctccgtccgctgccagttctccggcaccgacagcagcgggcgctgataatcgctgcgggttaaattcccgcagcccgtcagcaatacaattaacggtaataaagtcagcggtctcattcgcgggccagcgcctccgtcgggttcagtcgcgccgcgcggcgcgctggaaaatagccaaacgtcaggccaatcagggcggaaaaaccgcaggccatcgctaccggcagccaggtgaagaccatggaaaactcctgcgtcagcagggcaaacaggttaccggcggcccaggagcccaatacccccgtcagcccgccgagcgcgcagatcatcaccgcctcaattaagaattgatgcatgatgtcgctggggcgagcgccgaccgaaagccggatgccaatctcatgggtgcgttcggtaacggaaaccagcatgatgttcatgacgccaacgccgccaaccagaagcgagatggcggcaatcgcggtgatcagcagcgacatggagtcagaggttttttgcagcgcgttggcgagctgttcgtcggtctggacaaagaaatcttttttgccgtgctcgcggataagatgcctttccgcccgccgcgccgcgtcctgcggcgacagcgtttcctgaaagcgcagcgtgagcgcctccagcggtttgtccccggaaatccgctgcaacaaagaggtataggggatccaggccgacataaacccgctgaccaccttcggtcccggcttgctggcgatgccgatcacccgccacggcgcgccggcgatttgcacaattttacccagcggatcttcattaccgggaaacagcgtctctttgctggtttcatccagcaccagcaccggttcacgatcgtcgacatcgcggtgggtaaaaccgttgccgtgaagaaaacgaatgccctgcagcgagaaatagtcggcggaaaccccggaaagaataatcgaggaatcaaacccctggcgcaccgcggtcgtcatgctggagacgatcggcgacaccccaagcacccacgactgtttgccgaggctggcgatatcatccagcgacagcgcccgctccatatccggacgcttgctgccccagccggtgccggggcggatttcgagcgtggtattacccagcttgccaatctcgttcatgatgctctgccgggcgccttctcccaccgccatggaggaaaccacggacgaaatgccgatgataatccccagcatcgacaaaaaggcgcgcatacgatgccccagcagcgaccgccatgccatccgtaccgactctccgatactgcgcgacagcgaggcccggccgttatcctgtaccgcgggcagccgcggaatgccgcgattatcacgcgcgccgtgggtgctgtcggcgaccacctgcccatcgctgatctcgacgatcctctgggcctgctgcgctacctcgcgatcgtgggtcacgataatcaccgtatgcccgtcagcgttcagctggtgcagaacatccatcagcgcccggccgctgacgctatccagcgccccggtgggttcatcggcgagaataatctgcgcgccgttgatcagcgcccgacagacgctgacccgctgctgctggccgccggaaagctgcgcgggtttatgcgccaggcgcgcgtcaatgcccagcttttccgccagcagcgcaatgcgcgcctggcgctcagcggcgggcatcgcggtatagagcgcagggatggcaatattctcttccgccgtcaaataaggcatcaggtgatagcgctgaaaaataaatcccagccagcggctgcgcagctccgccagcgccgcgctgtcggcctgatgggtggcgatgccgttgatatacacttcaccgctgctgggtttatccagacaaccgataatattcatcagcgtcgatttacccgagccggaagcgcccataatcgccaccatctcgccgggcataatggtcagagagatggatttcagcaccggaatcagttgcgtcccggcaacaaaatgacgcgtgacgttgttcagcaagattaacggctcagccatcagacggaccccgcatcctgcgggatcaccacccgctcaccgggctgtaatccttcaagaacctgcgcatactggcggtcgttaatcccgatgcggatggtgcgctcctcgctgccgttctccttttgcaccacgaccaggtagcgctcatccccgagcgaacgccccagcgcggcaaccggcacgcgcagcgcatctttcacctgcgcgatgcggataaacacctgggcggtcatcgaggttttcagcaatcgctggcgattatccacctcgaaggtgccgttatagtaaatggcgctgctctgctggttaccggcagacgcgccggcgttttgttcctccagcgcctcctgcggcgcgggctggacatagccaagctccccttcataacgggtttgcgggtcggcaatgacgtaaaaccatagcggctgtcccggatggattttctggatatcggcttcggaaatacgggtttggacctggactttatcgagatcggcgagcaccagaatcgtaggcgcaatttgcgaggagacgatggtttgcccttcacgggtcacgatgcccagcacttcgccatccataggcgcgagaatgcgggtatagccgaggttggcgttggcggtctgcacgctcatttccgcctgcacaatctgcgcctcattcaccgctatctgctgaacctgcgcggcatactgcgcctgcgcctgttcgaggtcgctgctcacgccggagccgtcgcggctcatggcctgctcgcgcgccagcgctttacggtactgcaccagcgtggcctcagaggcctgcttttgcgctctggcgctggccagctgcgcggtagcgttgcgtaagtcggaaagctgcagcgtcgggtcgatttcggctaacagctgccctttgcgcacccgctcgccctggcgcacgtacagcttacgcagctggccgctgacctgcgcgccgacgctcacctggacggcaggtttgataatcccgctcgccagcacgaccttttcgatatccccgcgatcgagcgtaacggtatcaatcgactcggcctgtgccggaaatgagcgctgataatagacggcggcaacaatggccagcatagcgaccagcgcaaacagccacgttttacggcggcgtaaaaatgctcttctcattgctccacctctccctgtgtgatatcgcgcagcttgccttccttcaggcgataaacccgcgtgaagtgatgcaggatctgctcgctgtgggtcacgacgatcagcgtcttgccctgttcgcggcagtactggcacagcgcgaggatcgccgtttccgcggtttcatcatcaagattggcggtcggttcgtcgaacagcagtatgggccgggtgctgtagagcgcccgcgccagcatcagccgctgacgctggcctaaagagagcgccgagtggctctcgcggatcagcgcttccattcctcccggcagcgcctgaaccaccggccccagcgccattttttcgaccagcgcctccactcgcccgcgatcgctgtcgctgtaccacgggtcaaacagggtgatgttttgcagcaccgaggcgttgaacaggatgtcttcctgactctgtagccatacctgcgacgccagctgctgcgcgctcacctcgtcgttgttcagcaaaattcgcccatgctgcgcggaaaaaagccctgccatcagccgcagcagggtgctttttccggcgccggaatcacccacgatcgccagccgatcgccgggctccaggatgagatcaacggcattgagtaccggacgctgcgggttgtaatgaaagctcacctgctcgaacgtcagccgcggaaccgcttcaccgctgagcggagcaaactggggcgcagcaggctcatggcgggtgaacaggccctgcgcgcgggtatcgatcacgtgcagctgtgatttacggatcacggcataaaatatccgcgtgacgtaggaggtaaaaatctgtcgtaaaaagctgtaggcaaaaaagtcgcccagcgagataagctttgcgtgcaccagcggcagcaccaccagcataaaaaccaccatctcaaggctgccggtcagctggtacagtccctctttgacctgctgataaactttctgccgctggaggcaggtgaaaaggtcatgagacagacgggcaaactgcgctttacgctgcgtttccagcccggcggtcttgatggttaacacgccctgaagcgtttccataaaaaagtcattcagcgtcgcgcttttcagctgcagctgctgcgtataccagcggtcgcgaaaaatggcccagacgctaatcagccccatcgccacaatacccacggcggaaatcagcgccagcaccggggagatccagaacataatgccgatcgcgataacgcagatgatccagtccgagcggagcccgttatccagttcgattttttgcagcatcccgccctgccaggcgataaaacggctgaaaacgtcccccggcgcgcgtttttcaaaaaaacgcagcggattattcagcaggcgggaaaaaccgatatcgcttttaagcaggacaaagcggcgaataaatcgctcgctaatcaccctgacgcccagcgccagcagcgtggatacaacaaaggcgaggatgaaccataaataaggaaactgcgtattctgaacgtcagagaaggcctggttgatcgcccggctgaccatcgtcggcattaaaaacagggtgagcgacaccaggaaggtcaagagcatcagcttataaatgcccggaaccgccgcggtctccttcaggctcatcgtccgcggcatctcctgctgcgcgccggcaataaccgggtccgggccggcaatcgcgccgggcgactcttcaaggatcagcgcatagccgctaatctctttttttaatgccgagaaaggcagccactgctggccaatcgccggattcatgacgcagacgtaatccccttttcgccaggccagcagaacatagtggctggcgccgtagtgcaaaatggacgggaacggcagcgcatgaagctcagcgtgatcgaacaataccggcgcggtggcaatgccgagctgctgcagaataacggataaatcgctcaacgatgtcccatgatcggatgccgggaaaatttcccgcaaagccggcagcgagcacggaatattctgggtttgcgccagcatcgcaatacaggagaggccgcattcattggtctcttcctggaaaaccatatcaggaataatctttttcatgatgatgcatcagtgattaataaaatagagcgaatggctgtgccacaaaagccaatcctgcggatagtcacgcagggtgttttcaatcatcgtcggtagctttgccgcgacctcttttggcctcagcggagaatagatctttatttttatcccgtgctgataatagaggtgataaaaaaccacctgcgccgatacgatgcgagaaaaccgctgtaccccgctatgtaattttgccgggcggccaaatatccggcagcttattttcccggactgcgcttccggggtctgcacggtgtaatcggcaggaatgtcggggaaaataatcatattttcccgccctgccgatacattggtcattaacgccataagctcgctagccagcgatgtattatcctggtggattgagcaataagagagcgcgacgccgcccatttttcggctggcgacggtgtagctttccgcgctggaagagaccactacgctggctttgcccggcgtcacgccagccccgaccatcgccgctaagatatcggaaacgcagtgcagcggcgcaaggacgaccggcgtcttttgcgccgccaggggagcgacaacggcgtcaagctctcgcgtgcatgcctgcatctgggccaggatggccgggtgctgtccccaggtcgcccctgtctccagcagctggcgacgcatggctatccatccggcatcaattcggccctcgacgcccgtcaggcagcggtagttttgcgtcgccacggcgctgcggccacggtactgtctgcccagcagccgcagccgacacagcgcgcgaaccgccagcagcagcagcggcatcggggtaaaacgcatgactctacgcaccgctttttggccgtagccggtaagaggccggtagcgccagctcagctgcgcggaccattttcttacgctgaagacgctccagacgatgagaaagcgcgccacgcttactccttatcctgggttaacagctggcgcaaatagtcggcaaattcaggaaactgacgatccttcgccactacgtattttttattgacaataaacagcggcgtcgcgttaatgtcataaagttcggtgattttcgccatatattccagacgctcggcgacggcctgactttggcgtagctgatggtatttatcgacatcaatactattctttttcagccagccattaagcgcttcctcatcggctaaattaatcccgcgggtcattaccgcgttaaatgcctggtcgcgcgtctggcgctcaatacccatgacttcaagggtcgcaaaaaccggcgcaaagaccgccaggccgttattctcgccagtaatatggataacttcaaaggtgctatccgcgggtagcgtggcggcgaatttttcgatctcttcctcgttcgatgcgcagtagtgacagccataggacatcacttcaataatgcttttctcatgttttattgggctactggcaacggttgcgctgtcaatttcccgcagggcggaaggctgactgctatccagtgaaaatgtattaaacacaaatatgtgatagcacagcacggtaattagcgacgaaattaacgccaccagaaacgtatagccaacggcggtaataggttttatcttcatttgataccaggctcgcgaaaatagcggagaaatacatggagggttccccctccatgtatcacatcagtgattaataacgggcgctatttggcacgacgcacatgctgtccggcgcatctttcatgctaacggttgaaccgtgcttatccgtacaggtggtcacttgtttacaggtagaaacaccgccaacgaccactgtctcgtaagagcttgtgcaagtttccttgcagcagccgccaataatagttgacgcttcaatcatacttaatttttgcatttgttagatccttaactatttatattgaaatgtatttttcttacacttacctactggcttagctatctgccagtaattctgtcgatgttagactttgtatgctgttatacgcagggggtggcgacgatacatttgaaaatattaaacagctctacgttatttttagcgtttaactttttcatcaggccccgtttgcagcggctcagtcgacgaacatcaattttttgctcagaggaaatttgcgacaatgacttccctttgaatatttcttccattaaccaccagtcatcgctggagatactgttattaaaatcccgggctaaccacttctgtcgggtataattaatcagcgagcggctataaaatattttttttgccaccatcgaatcagcgccttcaatgaatttaaaaaagttctccagcgactcattttttaataaccagctcgcctccgggagcagcgaatgcagcgcaaaaaacagagaaatattattttctcctaataaaatcaccagctgctgattttcccggcagtagtactctttaatggtgtatagcgcattaaagcgttcgtccggcaaactgtcgacatcgcagagcacccagcgcagctcctctttctgcttcggcagacgcagcgtattaatcagctgagagaactggtcgagccttgagaaagcgcagtcgccgtcatgcgcggcaagatcgtcaaccaaagaacgtacgccttctgagaaaaagatatttttatcgtagagaaagaaacggcggctcatttatcatcatccttgatctattctactggtaattaagggtgtaatacgctgttgcctggaaggcaccggtctgcaaggttttgttactcaaggcgtccggttccccttcaacaaaagctttaaaatttaactgcatggtggcatcggaaatggcgaccgcggttgttggcgtattgagtgaaatcgccgtgccgttactctcttcaaaaccaatgccaataccgctggcggaatttggcgctaccggcgtaatcgccagacggtcgctcatattggcattttccgtcccgctaaaggttacggtaacggaattaaaaacatcggtactgcaatccttaagctcaatcacaaacgctttgggctgtgatttgctctccgcatagagcgtacgggttgaaatctggccaaaatccacggcgatatttttggatgaaggaacgatactgcagccatgggccgcgacggtgcctttgaaggttaagtcgccgccgatcagttccccactggcgtacgccggcgtggccgccgacagtaagcccagaagtaccatagatgcgataaattgacgcatgctgcccccttactgaaactcagcgaccacggtggccgatgcctggaaatccccttcgagaacgttggtcccggcattggcaatcggcgcggcggtgagattccaggttccctgattattattaaaacccggcacgtcataaaatctattcgcggccactaaactgccgcctgaatctttcagaataatgccaagattggatcgatcgacggcgccggtggtccctaaataatcgctattaaaactggcagtattggcctgctgaatacccaggcgaatatttaaattaccgttcgcgaaacttcccccttcgcatttcacctgaataggcacggaccggctgtaattattgccatttagcagcgaacccgaactggggatggtatcaaaatcaacgacgatcggtgagcctgagttaacaatacatttatccggaacggtaatgaccccggaattaatcgagacaatcgacattggagtgctgcccattcctgagctatagttccccaggcggccgtaaagcttggcgatttctgtacccaacaggttaacgccgttgacaataggcttagtaatcataaacgttacccgccccttggcgccggactcaaagttattaaattgggtggttggcggaacgcatttattctgaaaagcgttattcgattcattataaaaaggcaccgcaaaataatccatgcgcttaccacggatataaatttcaatttttacatccatataatcattgagctttaaatagcccggcgcgcttccctgctgcatcagcgaggcggtcgcagagtaataaatcgcctgattttccataggaatggtacagctggctataccagaatattgcccacccaatgaaaattcataaggaatcgttgccccaatgctgttattggtaatatcctgattgaccacgtcaatattatacattttaggtccgccgaccggcgtaatttccccttcaatcgccgcgctggcgtcaagggataataagccgccgcagagtaaaagcgtgacgtaagattttcgcccgataaccatcgtcgtcatcagagatactccatttttaaacgtagcagtccgctaaagttgcccgcggtcacgtttcgtccggttgactccagcactgcaataaacgtcaggctgctatcgccggttttcacaataaacggcggctgcgtttgattaatatccagcgcccgctctttgacatccagcaggcgaataccggctcctgagatgctgccggtcaggcgcagcagctggcgattatgttcatccgattcgccgataaaagtgagctgaaccgcctgctcgccggtggtgtagagatgcttgctgctgcccgtcgtccgtgaggcgatgctgtcgcgcgcctgcgaggcgcctttcaggcaatctctgagttcgacgcgaaccagcaccggctggctccggtcgccggcctgatgaaaacggcgggcgctgatttcacccatctcaataatctgcaggcggctctgcggcgccagcacgcaaggcgaggcataaacggagccattgaatatcacgttaccgccatcttccccctgatgatcccggttatagtgctgtggctgtagcggaatatcagcgtcggccagcgctggcatactgataccgaatacaaacagtgctaatagcgatagacgcgttttcatcatcaggttcctctttaattacccttgctgctatggcggcagcgctttacaggtatttccttcacagcgatatttcagctccggatgaccgccataatcgttcacatacatcatggcgaaatctcgcacgccgccgtcggttacgctgaactccatgctggacttcggcgcaatcataatccccggaaacttagtgattttttcacccttaacgcgggacaagctaataatggtgatgtaatagggcgtcgggttttgcgcggtcatcttattgccgctcttttgaaagacgacctggtcctgccaaatctcgcttttgcttttgggaataatggccgtcgggcggtaaaataatttaatccgcgactgcatggctaactgcaggacattcgctttatccggcttgggcgggatttcgcgcacgcttaaataaaacaggctttcccgatcctgcggcagctggttaataccatcagttttggtgacccgcgccacccctttttgcccgccgttaatccgctgtaaaggcggcagcaccaccagcggagaggtaatcttgttgcccttgctgtcctcaacccacgattgcgcgaggaaaggaatatccgggctggtgttggttaaattcgcgctcgccgagctgtctttaccggttatgataagacgcgtgcgatccagcgaaacccctgcctgagcggtaccgcttaccgccgccagcatcacaacgcccatccagcagaatttgttgcttgttatgctcatttttggccttttattactgtcactgtcatttacacggcaatagcgcggctgtcgaacgacgcacgatggtcggcgggatggcaatctggcactgctttttcccgctccacactacgcttagcagctcctgaggattaacccccgccagccatccctggccaccttccataatcatggagacgctcacgccatcgccgttgataacctccgcgccgaacggtggataggtaccgtcagccaggcgaataatccccatcattttttcgcccttcgccatgccaaaggtctgatagccaatggcgccttcggtcagcgtggcagtgctgatggcctttgccggttcgatggattccgacatcgcatcgacatcaacgcgggtatcaaagctgttgtagctcacgatgtccggaataacggcaataccgaaattgttggttcttgatttaccgtcattgagcggaacgtcgccgataccgttggtattcaccatcacgcgcgccgtgttaagcgtcgcgccgctgttgtggatcgccgccccgtgccgggtagcggtaaagccgccgcgcagggtgctgctcagggaaacgtagtgatcctgctgatagctggcgttgctgttgatttcggcatactgcgagcggcgctgatagtagccgtcgacgttggcatagccgctctggctcgccccggcacgcagtcgccacaggttgttgtagtcgctgctgtcggtgtacgagagcatcgggctggttttgccgttattggtctgtacgtcgagaccgctccatttgctatcgccaacgggaatggaaagcgagaaagcaatagagtcgtctttacgcccttcgtaatcggaacggtaggccgaaatattggtggtgatcccgcgaatattaccgacgttaaacgagcgccctaacgagatgccgtagcgatcctggctgcttcgattccagtaattctggtgggtataggtcagaaagacggtggtcgctttgcctggctcatcggcccagaacgttttattcccggtgatggtatagacttctttttcacggccaaggctgtcgtaaccctcgtaacgctcgttgagatattgcgagaaagagcggaaatcttcctgagagaagcgatagccggcgaaggtaattgaactgttatattcgtcgaacgttttcgcatagctcagcttaaacgaggtgcctttaagccgcttctggtttgactgctggctgtaggattcggtggcgtccagcgagagcgcgcccagtacgctgagatcgcggccaataccggcggagaccgcggtatattccgcccctgcgctttgtaaaccaccgtacagcgaccaggcgttggttatcccccaggagaaatcaccggaagcgaaacctggcccctgaattttatggttatagcgggacggcgcgccgacagccacgttgtaacgcacgtagccgggacgcgtaaggtaaggaatgttggcggtgttaacctggaacgtcgaaatggaaccgtcctgctcctccacctgaacatccagcgtaccgcgcaccgaactgcgtaaatcctgaatgttaaacggcccggcgggaaccgtcgtttcataaataatgcgcccgctctgcttcaccgtcactttggcgttggtcttggccaggccgcgaatttccggcgcgtagccctgcaggtttggcggcagctgacgctcatcgctggcgagattaagcccggtaaagcgcacggtgtcgaagacctgagaatcaaggtagatctcccccgccgtcagctttgccgccatcatcggcagcggacggtaggcgtagatctgattcatgtcgaaatcaaattgatgcgtcgcgctgtaatagctggtctgatattcgccgcgcaaacgccagccgccgaggttaaacccggtctggccgtatccgctcagggtggtgtaatcttcatgcatatcaagctggcgggtatattgcccggtcagactgtagtcgagcaaaaacccacctatgccctggtcccagcgctccggcggcgtccagttcggatcgttgtatttcatccacgcctgcgggaccgtgatgtccagcaccccggcgtagttgctgagcgtagcgccaggaaggctcagcaggtcatagcaatcggcaaacggctgtgcgacctttttctgcgcttcttctttcaacgccaatctggcaagaatttcgccgttaatgcaggcctgggtatgcttctggtccttagaagccagatagcgaaccttttgctgccccaccgcctggccatttattttaatatctaataagtactcgcccggcgggacatagttgtcggtggcgaaacgggttaaatcgatattgtcgcgatcggcggcatccagtacgtcggtattgaattccacgtcggttgaggcacaagccatagaagcacagcagaaaaaaagcatctgagagaggattatttttatttttagttctgctgacatgactattcatcccgaatcattcagtaaaatatcgtgcgcggtaaacaagctacaacagcaatagctggcttgcgtctagttgtaatccatataaaaacgagtgacggcgtaaaaatccccagccttaatatgttgctgaaccggaaccagcgaagcggtgaatttcagcgtattattctcatcacttagcagatatcccgaagagggttctccaaaagttaaaacttccccacggcgatcgcgaatctgtataccaaacccctttccttccccatccggaattaatacggtcgggtcctgcgatgacgcattgccggtaaaagtaatcgtggcataagcaccgggcgttgattgattttcactgccgtaagacgcgcagcccactaagcgcaccagaaaaggccggacgagcttaccttcttgatccatattaatatcgcgagcggatatgttgccgaaatccacccatagctcccgcgagctgggatcaatatcgcaggcggcagcaaccagctcccccgaaagcgccagctgtccgggcgtaaaattagtactcgaagcatgtccggaaaagagtaataccgatacgaatagcgccatcagtctctttttctctgtatccttaaccatactcagaattccatattatcgggtacaccatccaatatcgcggggagaaacctccccgcgagcgataactcaaaatcgattattgataatcgatagtgaaattgatcgttgactggaatgcacccgcggttacggtagtggtagaaccgctcgctgccgcttccgctttcaggaaggccacgaaaggaatggtgttagtaccatcgaccagggtgaccggcgtggtctgcgcgccccaggtcacagtctggctagcgctatctttcaggccgatacctgcaccagatgcggtaccagaagtaaaggcagccagagtaggatcgttcgggttaaccgaagtcggggtataggaaacaacggcgctgctggcgatggtggtatcgcaatactgcagctcgatgtttttggtttcagttgcctgaccaccgccttgcagcagggaaactggaacctgaccaaaatcaacggttaccgggctggacgacggcgctaaaccacacgcggtattcaccagctcaccctgaagctcaatctgaccattagtggtatcagccagtgcagacattgagccgagagcagcagttaatgccacagccatagcaactttattcagtttcatagaaaattcctgcgttataaatttttatcctaaagagtaaggagctataaaattgctgagttatactctcataacaatttgcagccctccgcatcaccgaaaaatccgtttcaataattagactattaattaatattaataatttaattaaagccagatcccctggtcgacaaaaatactaacaaatcattttttaggtaaaaagagatacatttacaaaggaattaaaaaaagatttaacctcgcgaacaatgccaccataggaaattaactcgcagaatgctgagatatatcctaaaaacaaattacgaaaggtaattaatagaggataaacgaaagatgttgatggtaagagaattgtaacacagatcacattttattaacaaagccccttttctgctacacgcaacggtgaaaagtagacggaataagggaaataacgcgaggcgtacgacgccggtgaaaacggatgtctccccgtctataccatcgacctgcattcgccagtatagcctttttccgctgcgacctcctcctccggcataccgccgctgcttcttgttttcctgacctgaagactccgttatcatgcggctcatgagtcaataaacagaaatgcacagtttcacgggaaccgatgagcgatagcgcgacgtcatgaaaacaataaactccgctaactcattaaaacttcagaaaatggacagcaaaaactgatgagtacactagagaatcttgacgcccacaccccgatgatgcagcagtatctcaagctgaaagcccagcacccggagattctgctgttttaccggatgggtgatttttacgaactgttctatgacgatgcaaaacgcgcatcgcagctgctggatatctcgctgacgaagcgcggcgcttccgcgggcgaaccgattccgatggccgggatcccccatcacgcggttgagaactatctggctaagctggttaatcagggcgagtcggtggccatttgcgaacagattggcgatccggcaacgaccaaagggccggttgaacgcaaagtcgtccgcattgtgaccccgggtaccatcagcgatgaagcgctgctgcaggaacgccaggacaatctgctggccgccatctggcaggatagtaaaggttttggctacgccaccctcgatatcagctccggacgttttcgcctgagcgaacccgctgaccgcgaaacgatggcggcggagctccagcgcaccaaccccgccgagctgctgtacgcggaggattttgccgagtcgtcgctgattgagggccgccgcggcctgcgccgccgtccgctgtgggaatttgaaatcgacaccgcgcgccagcagctcaatctccagttcggtacgcgcgatctggttggtttcggcgttgaaaacgccccgcgcggcctgtgcgccgccggctgcctgctgcagtacgtcaaagacacccagcgcacgtcattgccgcatatccgctccatcacgatggagcgccagcaggacagcatcattatggatgcggccacccgccgcaatctggagatcacccagaacctggccggctgctttgataatacgctggcctcggtgctcgactgcaccgtgacccccatgggcagccgtatgcttaagcgctggctgcatatgccggcgcgcgacaccgccgtgctggtagagcgccagcagaccatcggcgcgctgcaggaacattacaccgagctgcagccggtactgcgccaggtcggcgacctcgaacgtattctggcgcgcctggcgcttcgcaccgcccgtcctcgcgatttagcgcgtatgcgtcacgctttccagcagctgccggcactgcgcgcgatgctgggggacgtcgactgtgcgccagtacagcggctccgggaaaagatgggggaatttagcgagctgcgcgaactgctggaacgggcgattatcgatgcgccgccggtactggttcgcgacggcggcgttatcgcccccggctataacgcggaactcgatgagtggcgcggcctggccgatggcgcgaccgattacctcgacagactggaagttcgcgagcgcgagcgcctggggctggacacgctgaaggtaggctacaatgccgtccacggctactacatccagattagccgcggtcagagccagcatgcgccgatccactacgtccgtcgccagaccctcaagaacgccgagcgctatattattcctgagctgaaggagtatgaagacaaagtgctgacctccaaagggaaggcgctggcgctggaaaagcagctgtacgatgaacttttcgatatgctgctgccgcatcttggcgacctgcagcagagcgccagcgcgctggcggagctcgatgtgctggtgaacctcgccgagcgcgcggagaccctcaactactgctgcccgacctttagcgataagccgggtattcgtatcagcgaaggccgccatccggtggttgagcaggttctgaaagagccgttcatcgctaacccgctgcacctcgccccgcagcggagaatgctgattatcaccggtccgaatatgggcggtaaaagtacctatatgcgtcagaccgcgctgatcgccctgctggcgtatatcggcagctacgttccggcggaaaaagtcgacatcggccccatcgatcgtattttcacccgcgtcggcgcggcggatgacctggccagcggccgctcaacctttatggtagagatgaccgaaaccgccaatattctgcataacgccaccgagcatagcctggtgctgatggatgaaatcggtcgtggcacctcgacctacgatggcctgtcgctggcgtgggcctgcgcggaaaatctggcgaacaagattaaggccctgaccctgtttgccacccactacttcgagctgacccagctgccggagaaaatggcaggcgtggccaacgtccatcttgatgctctggagcacggcgacaccatcgccttcatgcacagcgtgcaggatggcgcggccagtaagagctacggtctggcggtagccgcgctggccggtgtgccgaaagaggtgattaaacgcgcgcggcagaagctgcgcgagctggaaagcattgcgccgagcgctgccgccacgcaggtggacggtacccagatgtcgctgctttccgctccggaagagacctcgcccgcggttgaagcgctggagaatcttgacccggattcgctgactccgcgccaggcgctggagtggatctatcgcctgaagagcctgatgtagttctcgtttaacgtgaaaaaacggcagcgccctgcggtgctgccgttttaacaaatgcaaactgggtgcgagaggatgcatcctgacaaccaatacgcggggttgcccccgcgctgatgctatttcttcgattcgtaagcgagaacagctttaaactccatactacgctctttagtactgagttcgcacagcgagctgcgcaccaaaagcgtaaatcccagtaccgtaatacacagtacgacgattgccacaagggcatattttgttagcatgtcttgcctccctgcaaagaagagactaacatctgaattgttcaggttcattcgtcagcctcagttgatagaaatatctcctggggctttcgtctatctgaatccttgtcaatgctcaaagccagatagcctcaagcacccgccgctattctatattttcccggccgcgaagcttatcggtaatttatcaaacccgttgattttattataaactggaagatggctcgcaaacgtatctgctctattaaccttttatgcaatttgaaaatttaattaataaatattttgcattgattaactaaatataaaaaggcccgactaagcggaccccgttgattttagcgtttatcttccgccagcagcggcggaatatgcggcaccattggcgcgtcatcgatatccttttgggtcatgcggaacgcttccggataatgttcccggctggtgcggcgtagcggttcagtattccgccaggtgtagaaacagtgctggcactgaaataccgtccagacatcttttaccggcgatgttgccagcacttcaatatgttcatcggcgcagcgtggacaaatcatcttcttctccttatttacggttggccagcatggcggtcagtttttcagcccaggctttggtttcaggaagatcctgtaccggctggctgtagtggccgcgcagatcgggcgcaaccggcgtggtggcgtcgataatcagtttgtcggtgatccccgccgggctggagcctggatcaagctccaggaccgacatattcggcagctgcaccaggtcacccgccgggttgaccttcgacgacagcgcccacatcacctgcggcaggttgaacgggtcgacgtcttcatcaaccatgatcaccatcttcacgtagcccaggccgtgcggcgtggtcatcgcccgcagacccaccgcgcgtgcaaagccgccgtagcgttttttggtggagataatcgccagcaggccgtgggtgtacatcgcgttgacggcctgcacctccgggaactcggccttcagctgctgatacagcggtacgcaggtggccgggcccatcaggtagtcgatctcggtccacggcataccgagatagagggactcgaaaatcggcttgctgcggtaggaaaccttatcgatacgcaccaccgtcatattacggccgcccgagtagtggccggtaaattcgccgaacgggccttcaatttcgcgcttgcggctttcaatcaccccttcgaggatcacctctgacccccacggtacgtcgaagccggtcagcggcgcggtggcgattgggtacgggctttcacgcagcgcgccggccatctcatattccgactgatcgtatttcagcggcgtggcgcccatcagggtgataatcggatcgttacccagggtaatggcgatcggcaggtcttcaccgcgctcttccgctttgtgcagatgcagagcgatatcgtgcataggtaccggctgcaggccgagtttacgtttgcccttcacctccatacggtaaatgccgacgttttgcttaccaaaattgtccgggtcgagaggatcgcgagaaaccacgcaggctttgtcgagataaaagccgccgtcgccgtcattgagacggaacaggggcagaatatcgaacagattaatcgcctcgccgtcgacggtattttccgcccacgccgggtttgcccgccgctccggcgtcaccggaaatttatcccaacgacgaataaattcgtcgatctgatttttcaccggcgtattcggcggcagccccagcgagatagcgtggttctgccaggaaccgatggtgttcattgccacgcgcgcatcggtaaaaccgcgaatattgtcaaaccacagcgcgggagcgccatcgccgatgcgcccggtcgcgtttgccgccgcggccagatccggctccgcgttcacttcttcgctaattttcagcagttgcccctggtcgtccagcgcctgcaaaaagctgcgcaaatcatcaaaagccattattcattctcctgtgatacattctctaccgcccgcaacccgctccagcggcgcgctttgtgatactccagaccgaactgatccagcacccgcgtgacaacgtggtcagtgacgtcctcaatggttttgggatggttgtaataagcgggcatgggcggcaccatcgccacccccatgcgtgacagggccagcatgttttccagatggatcgtgctcaacggcatttcacgcggcaccagcaccagcttacgcccctctttcagcaccacgtccgcggcccgccccaccagcccctcggcataaccggcacggatacccgccagcgttttcatactgcaggggataacgatcatgccgtcggtacgaaacgaacccgatgagatgacggcggcctggtccgccggactgtgcgagaaatcggccagcgcagccacttcacgggcgctgtaaggcgtttccagctcaatggtggttttggcccactttgacatcaccagatgcgtttccacttccggcatctctcgaagcgctttgagcagcgccacgcccagcggagcacccgtcgctccggtcatccctacaattagcttcatcatcgcctcataattgttcgtatacgaacatttttattaaaactacgcttgatgagcttttcgtgcaagtgcgttcgtacacggccgcatttttcatcaaaacaggaaaaatgctaaaacgcctcccgaacggctatcatagaaccgacggtttgattacggagttgtcatggagttaaaaaacgaggcgtttcacctgctacgccagctttttcagcagcacaccgcccgctggcagcttgaactgccggacctcaccaaaccgcagtatgcggtgatgcgttccattgccgaacatcccggcattgaacaggtgacgctaacggaagcggcggtcagcacgaaagcgacgctggcggagatgctgagccgaatggagagccgcggtctggttcgtcgcgaacacgatccggcggacaaacgccgtcggtttgtctatttaaccgcagaaggcgaagcgctactggcaagctcaatgccgctgggtaacgccgttgatgaagaatttttaggtcggctgaacgatgaagagcgccagcagttttcgcaaatcatccacaagctgatagcgcgagaacccaattaacccaggcgctcgcggagaaaatcaataaacgcccggaccctgacgggaacgtgctgcgcgtccgggtaaaccgcgtacaccccctggcgcggaaagctaaacgccggcatcaccttcaccagcgcgctgtctgccagcgcagcggccaccagccattcgggcagcagcgcgatgccgctgcccgctagcgcaaaggccatcagcgcgctggcgctatctgccgacagccgcggcgcctgtttaatctcgaaggcgatgctctcctcatcgggcccggtaagcggccagcggagcggcgcggtcagacgttcatgaataatccacgccgcgtgggccagctcctcaagcgtctttacaggatgctgcgccagccatgatggggcagcaaccgggacgatggcaaaacgcgatatcagcgccgcgcggtagcgcgaatccgccagcgtcccgaggcgaatcgccacgtcaaaccgttcggagattaaatccgcgtggtgagaagaagaaacatggcgcacgcggagcgctggatgccgctggctgaactccgccagcgccgggataatcacctgcgcgccatattctggcgtcgttgtgatccgcagttcaccgctcaaccccacgtggctaccccggacgtcgtcctgcaggttttccgccgctttcagcagcgcgaccccgcgatgatagaagagcgaaccggcttccgtcagcgtcagtcgacgggtcgatcgcaacagcagcgtaacccccagctcgctctccagctggcgaatgttgaaactcaccaccgccttggtctgccccagcgccgtcgccgccgcggtaaaacttccgctatcgaccaccgctacaaatatgttcatccgctgcaggttcagcatcgcgccgccaattgtcaaaaaatttcagacagtatatctccgaatgtcgtgtttattcgccctgatgctgaggtttacagtagcggccttcacggggggtttaatcaatgacgtatcgcagcaaggtcgcaaccgtttttctgctgggtttctttctcgacttaatcaatatgttcatcgccagcgtcgcctttccggcgatgggccggacgctgcacgcgtcggtgggcgaactggcgtgggtcagcaatggctatattgccgggctcacgctggtactgccgtttagcgcctggctcagccagcagtttggtacccggcgggtattcctgctttcgctcagcatatttagctttggggctctggccgcaggaatggccgactcgttgaccagccttgtcatgtggcgcgccctgcaggggatgggcggcggactattgattccgccaggccagtcgctaacctggcaacagttcaggcctcacgagcgggcgaaactttccgccgcggtgatgctggtcgggctgctggcgccggcgtgctcgccggcgatcggcggggtgctggtgcaatcgctcagttggcgctgggttttctttgccagcctgccgatcgcgctgctgacgttcggactggcagcgctgtggattaaggatgagagacgcgtcgcgcggccggggggactcctgcgtctctcgctactgcgcgatccgctgctgcgcttttcaatgctggtctatctctgcgtgccggggacttttattggcatcaatgtcgtcgggatgttttatttacaaagcgtgacgggaatgtcgccctccgccatcggcgccctgatgcttccgtggtcgctggcctcgtttgtggcgatcgcgacgaccggccgctatttcaatcgtctcggccctcgcccgcttatcgcggtaggctgccttctccaggcagtcgggatcgtcaccctggctggcgtcaatgcccataccgccagcagtatgttaatcgcggcatttatattcatgggcgcaggcggcagcctgtgcagcagtacggcccagagcagcgcgtttctgaatgtggcgaacggcgatatgccggacgccagcgcgctgtggaatcttaaccgccagctcagtttcctgatgggatctgcgctactggcagccttactgagcgcctttttgctttactggccaacgccgcaggcgtggcgtggcgtatttatcgccgccgccgcgttgaccctggcgccgctgctgggctgccttaccttcgataaccgggcgataatcatgcgcctgcacggtaaaatggagaacaaatgaatcgctatattgcggaagttattgcggcccacgtggctatagaaaactggctgaatcagggtgaagggagcgccgacgcgctgatgcgtcgctttagcccggactttaccatgatcccgataaacggtatgcgcatggatcatcaggcggtcagcgccttttttcacggggctcgcgccagccgtccgggcttaaagattgtcgtcgatagtgccgtcatacttgccgaatggtgcgatggcgcagcggtgagctaccgggaaatacacgcgctccccggcaaagcggaaaccgcgcgctggtcgacggttcttttccgtctgcaggaagagaaaatcatctggtggcacctccacgagacggcgatcgcgtaagcgacggaggcccaaaaaagaaaaaggcccaatcaaacgattgagccttttttaagaaaggtgtcttactcgcggaacagcgcttcgatgttcagcccctggctttgcaggatctcccgcagacggcggagaccttctacctggatctgacgcacgcgttcgcgggtcaggccaatttcgcggcccacatcctcaagcgtcgcggcttcatagccgagcagaccaaagcgacgagccagcacttcacgctgcttggcgttcagttcgaacagccatttgacgatgctttgtttcatgtcatcgtcctgcgtggtgtcttccgggccgttgtctttttcatcggccagaatatccagcagcgctttttccgagtcgccgcccagcggtgtatccaccgaggtaatgcgctcgttcagacgcagcatgcggctcacgtcatcaactggcttatccagctgttcggctatctcttccgcgcttggctcgtggtccagcttatgggacaactcgcgtgcggtacgcagataaacgttcagctctttgacgatatggataggtaaacgaatggtacgggtttggttcatgatcgcccgttcaatcgtttggcgaatccaccaggtcgcgtaagtcgaaaaacggaacccacgttccgggtcaaacttctcaactgcgcgaatcagccccaggttaccttcttcaatcagatccagcagagccagaccgcgattgccgtaacggcgggctatcttgacgaccagacgcaggttactttcgatcatccggcggcgtgacgcaacgtcaccacgcagcgcgcgacgcgcaaaataaacctcttcttcggccgtcagcagtggggaataaccaatctctccaagataaagctgcgtcgcatcgagcacccgttgggttgctccctgcgaaagaagctcttcctcagccagatcgctatcactgggttcctcttcaactaaggctttctcatcaaaaacctcgactccgttctcatcaaattccgcgtcttcatttaaatcatgaactttcagcgtattctgactcataaagatggctcctacccgtgatccctgagcaaagcaccttccgctaaacatcacttaaaagacgcccggacgagaaccttttctgccccggtaaagcaggcattctggccgccctggcgcctcttttagcgatactgagcttatccgtactttgccaaattatcgctgcggtaaatactgcagcgggttgacggatttccccttgtaacgaatttcaaaatgcaaacgtgtagaacttgtacctgtgctacccatggtagcgattttctgccccgccttgatatcttgttgctcttttaccagcatcgtatcgttatgtgcgtaggcgctcaggtaatcatcgttgtgtttgatgataataagattaccgtaaccgcgcagtgcgttaccggcatagacgacgcgcccatctgcggtcgcgacaatagcctgtcctttactgcctgcaatatcaatacctttattgccaccttcggcaccactaaagttctcgataaccttgccatcagtcggccagcgccatgaagagatcggcgaactggttgacgtactgcttgcagtcgattgggttgtgctgacagccggggccgtaacaggcgcgacggttgttgtcgtcgcaggcttgttattcggcaacatcttattagcactctgttcacctgaagattcagaatacgtaatagttggttgggacgcaaccaccgcggtggatttttgtgcagaatttgcggttaacatcccgccgctgctggccttcacgctggcctgggcgacagggttatctccggtgattggctgaccggatgcgttgccaacctgcagcgtctgacccacgttcagtccgtacggcgccgggatattattacgctgcgccaggtcgcggaagtcgttcccggtgacccacgcaatatagaatagcgtgtcgccgcgtttaacagtataggtactgccgccggtatagctacctttcggaatatccccatacttacgattgtagacaattttgccgttcaccgtttgtaccggctcctgagccatcggctggacctgagcgggctgcgtctgcaccggctgcgtttgtaccgggcgcgcctgcggaacgttattggatggaggcgtgatcagcattccggaattcgtgctggaagacgaagtcccgccagccgagctgaccggcgcaggcggattgttggagctgctgcagcctgccagccacagtgacaccagtgataaagccgcaatgcggcttaaggtaaaatttgggcttcccgcgctcatttatcccccaggaatatgttaactaccaatatcttgctcaccggacggcgcccggccaggacacgaaaaatgtgtccaccctatgcctaaatgcaggcaaaaaaacctggaataatccgggttcaggctaactcccccttcacgaggggaacaaagcgcacggcttcgacagtatcaatgacaaactcgttgccgcgccgacggatccgcttcaggaactgatgctcttcgccaaccggcagcaccagtacgccgccatcgtccagctgcgccagcagagcggccggaatttccggcggcgcggcggtaacgataatcgcgtcgaacggcgcacgcgcctgccaaccctgccatccatcgccgtgacgggttgaaacattatgtaaatcaagttgtttaagacgacggcgcgcgtgccactgcaaactcttaattcgctcaaccgagcaaacgtgatgcaccagatgcgccagaatcgccgtctgatagccagagccggtgccgatttccagcacccgggactccggcgttagcgtcagaagctcggtcatccgcgccaccatgtagggttgcgagatggtttgcccctgaccaatcggcagcgccgtgttttcccacgccttatgttcaaaggcttcatcaacaaacttttctcgcggcaccatggcgatcgcgttcagcacgcgctcgtcaataatgccctgcgtgcggagctgattgagaagactttcaacacgtttacttaccattgcgtatcaactccaacgcgatccagccaaccgctaaccacctcatgcgcgccgtgggcggttaaatcgacgtgtagcggcgtgaccgacacatagccttcatccacggcggcaaagtcggtatccggcccggcgtcgtacttttcgcccggcggtccgatccagtacagcgtattgccgcgcggatctttttgcgggatcacctggtcggaaggatggcgactgccgcagcgggtcacgcggatacctttgatctgctcaagaggcagatccggcacgttgatattgagaatgcgcccggtgcgcagcggctcgcggcttaaagcgcgcagaatagagcaggtgaccgcagcggcggtatcgtaatgctgatagccgtttagcgagacggccagcgccggaaagcccagatgacggccttccatcgcggcggcaacggtgccggaatagatgacgtcgtcaccgaggttgggtccggcgttaatgcctgaaaccacgatatccggacgcggccgcatcagggcgttgaccccgagataaacacagtccgtcggcgtgcccatctgtacggcgatatcgccgttatcaaaagtgaaagtgcgaagcgaagattccagcgtcagggagttcgacgctccgctgcggttacgatcgggtgcaactatctgaacctcagcgaattcccgtaaggcctttgccagggtctgaatgcccggcgcatgaatcccatcatcgttactcagcaatattcgcatagtcacccgttgtattgataagctcccttactacgctggtggcgaagctgcccgcgggcagccagaaacgcagttcaacggtaacgtcatcccaccagttccagctcatctgctggggataaagcagcatcgcccggcgggcggcctctactttttcacgcaccagcagcgcctgtagctgcgtctcttcgaccactgccgcctgctcggcggccagcgcatcccgttggcttccccaatcgccgctgcccacaagcgcagcggtaatcatcagctcgcggttatctacccgcgcctggagttccgtcagttcttcagaggccgcaacgaaccagcttccgcgccccgctaattgtagcgcatcgccatcaacaacctgattaaattccggtttttttaatctaataccaacctgttgattaaacaatgcgctgcgggccgccgacaaccaaaaactgcgtttattgcgatcgcgcaccggcgcgccgctctcggcccagcgcagcgcccccagcaggttactgccgccgataccgaagcgctgggcgccaaaatagttaggtacgccatgctcagcaatcgcctgtaaacgcgtttcgacatcgtcgcgatcgctgatttcgcgcagcaccagcgtaaactggttccccttcagcgccccgaggcgcagcttgcgcttatggcgcgcgtactccagtacctgacagccttcaagctgaaatttgctcaggtcgggcatctctttgcccggcactcgggcgcacagccactgttcagtgaccgcgtgtttgtccttctgcccggcaaagctcacttcacgcgcatgaattttaaggaattttgccagcgcgtcagcaacaaaacgggtattgcagccgtttttcagaatacgcaccagcacatgctcgccttcgccgtcaggcgcaaagcccagatcctcaaccaccacgaagtcctccgggttggcttttagcagcccctggctcagcggttttccatgcagataagtgagttcgtcaaaagcgatcatttctccgccttacgcagcagcgccaccgcttcacaggcaatgccttcgccgcgaccggtaaagcccagcttttccgtggtggtggctttgacgttaacatcgtccatatggcaaccgagatcttcggcaataaagatgcgcatctggggaatatgcggcagcatttttggcgcctgggcgataatggtgacgtcaacgttgccaagggtatagcctttcgcctgaatccgccgccacgcttcgcgcagcagttcgcggctgtcggcgcccttaaaggccgggtcggtatccgggaacagcttgccgatgtcgcccagcgccgccgcgccgagcagcgcatcggtcagcgcgtgcagcgcgacgtcgccgtcggagtgggccagcagccctttctcgtagggtacgcgcacgccgccgatgatgattgggccttcaccgccaaaagcgtgtacgtcaaaaccgtgtccaattcgcattaagccttctcctggtgtcgggaacgggtaaggtaaaattcggccagcgccaggtcttccgggcgcgtcactttaatattatcagctcgtccggcgaccagttcaggatgaaagccgcagtactccagcgccgaggcttcgtcggtgatggtcgccccttcattaagcgcccgcgtcaggcaatcaacaagcagttcgcgagggaaaaattgcggcgtcagcgcgtgccataaatcgttacgttcaacggtatgggcgatggctgccctgcccggctccgcgcgcttcatcgtgtcgcgaaccggagcggccagaatgccgcccgtacggctggtttggcatagctgaagcaggcggctgagatcgtcctggtgcaggcaggggcgcgcggcatcgtgcaccagcacccagtcggcttcgccaagaaccttcaggccagcgagaacggagtccgcgcgttccgtgccgccatcaacgacggtgatttgggagtggttcgccaacggcagttggctgaagcgaacgtcgcccgggctgacggcaatcactacccgctgtataagggggtttgccagcagcgcggcgaccgcgtgctcgagaatcgttttgttaccgattgagagatattgtttagggcattccgtttgcatgcggcggccaaaaccggctgccggcaccacggcgcaaacgcccggaaaagtggctgccatgttgtaatcctgggcctgtttatcgattattctgctgttgccccgcggcctggttgcgttttgacgcatccggcaccagacgataaaacgtttcgcccgggcgggtcatactgagttcattgcgcgcgcgctcttcgatagcttcctgaccgccgttgaggtcgtcaatttcggcgaacagctgatcgttgcgtgcttttaatttagcgttcgttgcctgctgcgcggagacatcgtcgttaacccggctatagtcgtgcagaccatttttgccgaaccatagcgagtactgcagccagaccagcaaagccaataacagcagcgttagtttacccatcctgccccctgaaaaacggcatcatcatcccataactcgcccgagttctctactctggcgcgcggacgacgccgcgtaacgcggggactgtaccacatttttaccgttgatacccaggctagattcattcgtagaaaggactaccccagtagccagaggaacagcagaccgaacatcagtccgacggttaaaatcgtcgcgcagacgctgtactgaagtttgccgtccatcagcgaatgcagcgcgatgccaaccacgacggcaaccggcattaatgccaggaagaacggccaggtgtagaggaggacaaatagcgtgttactgccatagatcaggaagggaatacccagcgccagcagccatgaaataaagccaacggcagcgcccgacagagaccaggtggtctcgtcgctgactgccggcggcggttctgaacgaataatactgatgttctgggtattgcgcatatcgaatcctgttgacctggcgatcggcatcctgtgatgatgccgctgccgtttcaggatctgataatatcgctctgtcgtagcaggtctaataattggtgcaccaaatttgttaccaattgttcaccgtcgaggtgaatttcggcgcgctccggggattcatacactgaatcaattccggtaaagttgcgcagctccccggcccgtgccttcttgtacagccctttcggatcccgcgcttcgcagatcgccagcggtgtatcgacaaagacttcaataaagcgcccttcgcccaaacgttcgcgcaccatctgccgctctgcgcgatgcggtgatataaacgcagtcaatactaccagcccggcatccaccatcagcttcgccacttcacccacccggcgaatgttttctttgcggtcgtcgtcgctgaagccaagatcgctgcacaggccgtgacgcacgttatcgccatccagtaaataggtgctcacgccgagccgatgcagcgcctcttccagcgcgccggcaacggtggatttccccgagcccgaaagcccggtgaaccacagcaccacgccgcgatggccatgatgctgctcgcgctgcgcctgcgtgacaggatgcgcgtgccagacgacgttttcgtcatgccgggccattacttgcctcccagcaggtcgcgggcgtcccagtgcgggaagtgcttgcgaataagctggttcagctcaagctcaaacgcgctgtattgcgaagcgcctgcctgagcctgctcgttcggttcgcgtaccatccctgcgccaacggtcacgttagtcaaacgatcgataaaaatcaggcccccggtgaccgggttatcctggtatttatcgagtaccagcggctcgtcgaaagtcagatccaccagcccaatgccgttgagcggcagcgattccacttcacgctgggtcaggttgttaatatcgacctggtagcgtacgccatccacgcgggcgcgggttttcttaccggcgattttaatgtcatagctctggccaggcgttagggcctgctccgccatccataccacatcaacgctggcgctttgtaccgcaggcagagagacagtcgcgtccaccagcaggtcaccgcggctgatatcaatttcatccttcagcacgagagtgatcgcttccccggccgccgcttccggcagatcgccgtcaaaggtgacgatgcgcgccacggtggattccacccccgacggcagcactttcaggcgctgtcctacgctcacgctgccggcggcaaccgtaccggagaacccgcggaagtcgaggttcgggcggttgacgtactgcaccgggaagcgcagcggctggctttccaccacgcgctgaatctcaacggtttccagcacttccagcagcgtcgggccgctgtaccacggcattttatcgctctggctggcgacgttgtccccttcaagcgcggaaagcgggacaaagcgaatgtcgagatcgcctggcagctgttcagcaaaggtcagatacgcttcacggatggtgttaaaggtctcttcgctaaaatcgacgaggtccattttgttcaccgccaccaccaggtgtttgatccccagcagcgtggagataaagctgtgacgacgggtttgatcgagtacgcctttgcgggcgtcgatcagcaggatcgccaggtcgcaggttgacgcgccggtcgccatgttgcgggtatactgttcgtgtcccggggtgtcggcgataataaatttgcgcttctcggtagagaagtaacgataggcgacgtcgatggtgatgccctgctcacgctcggcctgcagaccgtccaccagcagcgccagatcgagtttttcgccctgggtaccgtgacgtttgctgtcgttatgcagcgaagagagctgatcttcgtaaatctgacgggtatcgtgcagcaggcggccaatcagcgtacttttgccgtcgtcgacgctgccgcaggtcaaaaagcgcagcaggcttttgtgctgctgggcatgcaggtaggcttcaacgccgccttcgttggcaatttgttgtgcaatagtcgtattcatggcggctccttagaaataaccctgacgtttcttcagctccatggagcctgcctggtcgcggtcaatcacgcgcccctgtcgttcgctggtggtcgagaccagcatctcttcgatgatctccggcagcgtttgcgcattggactccaccgcgccggtcagcggccagcagccgagggtgcggaagcgtaccatctgttttttgatcatctcgccgggctgtaaattgatgcgatcgtcatcgatcatcatcagcatcccgtcgcgctccagcaccggacgctccgccgccaggtacagcggaacaatttcaatattttccagatagatgtactgccagatgtccagctcggtccagttggagagcgggaatacgcggatactttcgcccttgttaatctggccgttatagttgtgccacagctccgggcgctggtttttcggatcccagcggtggaagcggtcgcggaaggagtaaatacgctctttagcgcgggatttctcttcatcgcgacgggcgccgccgaacgcggcatcgaagccgtatttgttcagcgcctgcttgaggccttcggttttcatgatatcagtatgcttggcgctgccgtgcacgaacgggttaatccccatcgccaccccttccgggtttttgtgcaccagcagctcacagccgtaggctttagcggtacggtcacggaactcgtacatttcgcggaatttccagccggtatcgacgtgcagcagcgggaacggcagggtgcctggataaaacgctttacgcgccagatgcagcatcacgctggagtctttgccgatggagtacatcatcaccgggttagagaattcggcggccacctcacgaatgatatggatgctttccgcctccagttgccgcaggtgagtaagtcgtttttggtccataaccgttccttaagccagatttactacagaagccttgaaggcgtctgaggatgaggtgtgttgaaaccaggcgagctgttgatgtaattgcaccacttcacccaccaccagcagcgcgggcatcggggcgtctttcgccaggttttcaagctgttgtaatgtgccggtcttcgtttgctgatcggcgcgggtgccgcgcgagattaccgccaccggggtatcgcctccgcgaccgttggcgatcagctgagcgctgatttccgccgctttcagactgcccatataaatcgccagggtctggccgctttgcgccagccgcgcccagtcgagcggtgaattttcagcgccaaagtgcccggtaatgaaggttacgctctgggcataatcacgatgcgtcagcggaataccggcataggccgttgcgcccgccgccgccgtgacgcccggaacgacctgaaatggaatgccctcttcggctgcggcctgcagctcttcaccgccgcggccaaaaataaacgggtcgccgcccttcaggcgaatcaccgtcttgcccgctttcgccgcttccagcagcaggcggttgatctcctgctgcggtacagatacgccggcggcgcttttgccgacgcagattgtctccgcgtcccggcgcaccagttcacgtacttccggggtgaccaggttgtcgtaaaacaccacgtccgcctgctgaagggcctgcaggccgcgcagggtcagcaatccggcatcgcctggccctgccccgacgagaataatttcaccagggcgtttttccggctgccgaagttcatcttccagcgctttttccgcttcatctttattgcccgccagcatcaggctggcaaagcgacctgtaaacacgcgctcccaaaagcggcggcgttcggcggtggttttcagatgggttttaatatggtgacgccagtagctcgccgtttcagccagccgcccaaggttggtgggcagcagcgcttcgattttttcgcgcaaaatccgcgacagcaccggcgcttttccgctggaagagatagccaccagcagcggagagcgatcgacaatggatggaaagacaaacgagcacagcgcctgattatccacgacgttgaccagccgatagcgcgcgttagccgcgacataaacgcgttggttcagctcgtcatcttccgtggcggcaatcaccaggaatacgtcgtcaagctgctgctcttcgaatacggttgcccgccactgaatttcctcgcgctcgaccttttcggcaagttccggcatcagcgtttcggcgacaatttgcaccttcgcttcagcgcgcagcaaaaacgtaatcttacgcgcggctatctcgccgccgccgatcaccagcacgggtctgtctttcacttcggcaaatatcggcaagtattccactgcgcaacaactctcttacaatcagcaatagagcgactatagggtgcggtttagagcaaatgaaattacgaaatggaatgagttgttactcaaaagaataacgacctgggaaagcaaatatcaaaaagtgcttaacacgcggtttttccaccatttaagagcgattgaaattgtttaaccccggtcacagtttcatactacgcgggtgaaattgttttaagtgctaaaggaccccctatgttttccgcattgtgccgtcgcctgctccccctggcgttgggcgcaggttttgtcttctccgccgccccggcattcagcgccccgggcgaaaccgccaatgcccaggctcgtcatatcgccaccttttatcccggaagaatgaccggcacgccggccgagatgctgtcggccgattatctccgccagcagttcgcccagatgggctaccagagcgatgtgcgcagcttcaatacccgctacgtctataccgatagcaatcagcgtaaaaactggcataacgccaccggcagtacggtgatcgccgctcatgaaggccaatctcgccagcagattattatcatggcgcacctggatacctacgcgccgcagagcaataaagatgttgaaaacaacctcggcggcctgaccctgcaagggatagacgacaacgcgatgggtctcggcgtcatgctggaacttgctgaacagttaaagaacgttcctacccgttacggtattcgcttcgttgccaccagcggcgaagaagaaggccggctgggtgcgcagaatctgcttaagcgcatgagcgacgcggaaaagaaaaacaccctgctggtgattaatctcgataacctggtcgtgggcgataagctgtactttaatagcggccgcagcacgccagcatcggtgcgcaagctcacccgcgaccgggcgctggctatcgcccgtagccacggcatcgcggccttcaccaatcctgggatgaaccgggacttcccgaaaggcaccggctgctgcaacgacgccagcgtttttgatagcgccgggatcccggtactgtcggtggaagcgaccaactggtcattgggtaagaaagacggttatcagcagcggagcaaatcacgcagcttcccacagggcacgagctggcatgacgtacagctggataacctgcagtatattgataaagcgctgccggggcgtattgagcatcgcggacgcgatgtaatgaaagtgatgctgccgctggtgaaagagctggcgaaggcggagaagagacccgcctcaaaatagactaacgataaaatcaggcaacaaggactgtcgccatgatgcgttttcattttttaataccattgttgctactggctgccagcacgcgatccatcgccgacagccaggtttatatctggcagcgcgtctggcaggacgggttggatttgggctcggaacccagcatcggtaaaacatcggtataagcgctatgttaaaaacggcgcactgttcccatgagcccaaaatttggcaagtattacctggaagcggactttgccacactaaagaatgctggaaaaaataaagtacaggataataaggatggcggcgcggggaacacgtgtattgaactgttgccacgtttcctccgggcggtttatccctgctggcgcggggaacaccattcagacatcaaccaagcgtttcgtgagtccggtttatccccgctagcgcggggaacacgatgattgcgctcggatcacttgttaccattgcggtttatccccgctgacgcggggaacacgcagcctgaacagcaagggtgcgctctgaagacggtttatccccgctggcgcggggaacacgcaaaataccaggtcgccccaatctgtcgcgacggtttatccccgctggcgcggggaacacgtgccgcgccgctgcgtgaagacctgcgtaatcggtttatccccgctggcgcggggaacacttcttccgccttcgctatgtctgcatcaatctcggtttatccccgctggcgcggggaacacatccgctcagtaaagcccagcccgtttacgttcggtttatccccgctggcgcggggaacacattcactgattcgcccctacgaccgcctggcccggtttatccccgctggcgcggggaacacctgtgccatctggaaccagttagcgcgctgctcggtttatccccgctggcgcggggaacacggaaccatgcgtaaatcagaagttatcgaacacggtttatccccgctggcgcggggaacacgcctcaggttgatgtaagtgttgctggattttcggtttatccccgctggcgcggggaacacagctatagtcagtgacaagtattccgttgtgccggtttatccccgctggcgcggggaacacaatgacaatcgcagaccataccctcccgtcaacggtttatccccgctggcgcggggaacacgaggagacggtattcatggagtagtcgaaacccggtttatccccgctggcgcggggaacacgaggtcgtgaaaacggaaatcctctatccccgcggtttatccccgctggcgcggggaacacactattttcggagttaattatggcaaaaaaaaccggtttatccccgctggcgcggggaacacgggagaagtctctgggcttacggcaagacaattggtttatccccgctggcgcggggaacactttcgtgaccgcttcgatgagtggccaaacggcggtttatccccgctggcgcggggaacacctcatagactcatatctatttgagtactcaaccggtttatccccgctggcgcggggaacacgccggttccggtgcgatcggtctcgttgaactccggtttatccccgctggcgcggggaacactctttcgtatcaggcccactgtctgacgggttcggtttatccccgctggcgcggggaacacggctgatagtgctgccagaatccccctcgtagcggtttatccccgctggcgcggggaacacttccatgccagtatcaaccgggatcggcatatcggtttatccccgctggcgcggggaacactctctgaaaaactcgcttgtgttaagccttcgcggtttatccccgctggcgcggggaacacttgccggtgataagtatctctttgagcgcttccggtttatccccgctggcgcggggaacacagagcgtggcggaaagtaaaatcgtggtattgccatcgctggcctgtttttcaatcagactttccagaatccgcgacatataggcgtcataggcgtgaatctcatccgccagcaagattttattattcagccctaacatccgcaggttattgtgtttaaacggcatcaccgccatcatcgcctgatcgagcgtgccaacgcccacctcggccaacagcgcttttttattactgtcggcaaaccaggcggcgcatccctggctggatggctggagctcatcgggttcttctgaacccgataaatctcccgaccacaaagactgattgaagcgatccattaatccacgtgcgctatgcgccagcaccaggcttggccgtgaaccgggttgatacaacgccagccagctctccgacatacgatcgaacatggcattcgccgtcgccatcgtcggcagaccaaaatagagcccctgcgcctttcccgtagccatcaggcgatgtgtcaaaataagcgcagcctctgtttttccagcaccagtcacatcttcaagaataaataattgcggaccttgtttatcaatatccagctcaagcgctttttgctgtaatggggttggctgttgaataaagggaaataacgccgttattccgctaaaagaggcaacgtcaggggaaggcgggaaaacggtcacggctactttcgctttaaccagcgcatgttgttgccagtattcatcgacctccatcgattttgtaattcgggggaaatattgggttgaagaaccaacccagtcagccagtactatcgcagcggaaataaaccatgagagatgtttaaaaagcgcaataccgttatcatcatcccaaaaatcaggaatctcaatcagtggaaataatgatttaaccctggtaagaaaatcacgggccgcttctttatcctgctgacgaaaattttttagttctgttactgaagaaggcggtcgcccatgatgtcctgtcgtaaggggcatccaaagcgcaatgacgcgctttaacttccgagcagaaagaggggattcggggaaaagttccgcgcactcgcttaaataatctttccagagccaataccccagggtcgcatgcgggatggcttcataatattttatatattcgtcctgcgcatttaactcttcatgacgataaagctgctgaaaagagtgggcaaactttccaatatcatgccagcataatagccatgcaaaaaattgtgccgcctgaactctatgatgaagccccagtttgttaagataatcattaatgccatggatattatgctgcaccatccaatagccaacggctgcaacatccagagaatgccagcacagcaagtgataatcatcaccgccatcatcctctccacggcgggatttaccccaataattgaacattatctctattattccatttagcaggcgtatttattcaagtatgttcacactgcaaaataagagaaatgatttacatcaaaaatattttatctttgcgatgaaattgataacaaatatcaattattaataattataaagacatcaaatcattaattaacaattcaggaaaaaatcccggcagcgccgggactcatcttagccttcgtgcagcccgcactctcttttcaggccaaagaagcgcgtttcttcctccgccatccccggctcccatttccgggtggtgtgggtatcccccaccgacaaatagccctgatcccacagcgggtgatacttcaggccgtgcttttgcagatactgatagacggtacgattatcccagtcgatgatcggcagcaccttaaacacgccgcgctggatcgccagcaccggcaggtgggcgcggctgccggactgctcgcggcgcaggcccgcaaaccaggtttgcgcattcagctcttccagcgcccggttcatcggctcaactttgttaatatcattgtacttttcaataccctcaacgccctgctcccacagcttaccgtagcgcgcctcctgccaggcggcgctctccttcgcccgatagatcttcaggttcagattgagtttgtccgttaactcgtcgataaactggtaggtttccgggaacagatagccggtatcggtcagaatgaccggaatatccgggcgcacctgattgaccagatgcaggctcaccgccgcctgaataccaaagctcgaagagagcacatattcgcctggcaggttttccagcgcccacgcgacgcgcgcttccgcgctcagcttttccagctggctattggtttccgccagttgcaaaacacgatcgaccttcggtaatgcgttcagcgcgtttagatcgagtacggacataagaacctcgcttgcctgtttcgccgggcggtactgcgtttgcccggcctacaaaacccacaggcccggatcgctgctcgccaccgggcacctggatgttattcccagaaatcacgggctgggtcgagcaccgggcgaatgatgcccgcacgcaccgtaaagtcgccgaagccttcacccgcttcgcgctctttcgcccagcgccctaccagttcgtcgatcgaatcgagaatttccgactcggtaatgttttcccgatacatacgcggaatacgcgtcccgctgcggttgccgccaaggtgcaggttatagcggcccggcgctttaccgaccagccccacttccgccagcatcgcgcggccgcagccgttcgggcagccggtaacgcgggtaacgatatgctcgtcgccaacgccatgtttgctcatcagcgcctcgactttatcgataaacgacgggaggaaacgctcggcttccgccatcgccagcgggcaggtcgggaacgacacgcaggccatagagttttcgcgctgcggcgtgacggcattcatcaggccgtgatcgcgggccagcttctcgatcttcgccttctgatcttccggtacgctggcaataatcaggttctggttcgccgtaatgcggaattcgcctttgtggatcttcgcaatcttcagcaggccggttttcagcgggcgacccggataatcaaggatacgaccattttcaataaacagcgtcagatgccagttattgtcgatacccttcacccagccgatacgatcgccgcggccggtgaattcgtacggacggatcggctcaaacttgatgcccgcccgacgttccacttccgccttaaaggtctcaacgccaacgcgttcgagggtgtatttggttttcgcatttttacgatcggtacggttaccccagtcgcgctgggtcgtgaccaccgcttccgccaccgccagagtgtgctccagcggcagatagccaaactcgctcgccgtacgggcgtaggttttcttattcccgtgctcaatcgataaaccgccgccgaccagcaggttgaagccgaccagcttgccgttttcggcgatggccacgaagttcatatcgttcgcgtgcagatcgatatcgttctgcggcgggatcaccacggtcgttttgaacttacgcggcagataggtctgaccgaggatcggctcttcatcggtggtggcgactttcttctgatccagccagatctcggcgtaggcgcgcgtgcgcggcagcaggtgctcggagatcttcttcgcccattcgtaggcttcagtatgcagctgggactcgtacgggttagaggtacacagcacgttacggttcatatcgttggcggtggccaacgcgtccagcccgaccgaatgcagcatctggtgcaccggcttgacgttcttcttcagaatgccgtggaactggaaggtctgacggttggtcagacggatactgccgtagatggtgttatcggcggcgaatttatcgatcgcctgccactgtttggtggtgatcaccccgcccggcaggcggcagcgcagcagcatcgcgtgacgcggctccagcttctgcgccgcgcgctcggcgcggatatcgcggtcatcctgctggtacataccgtgaaaacggatcagcagaaagttatcgcctttaaaaccgccggtcaggccgtcgttcaaatcttccgcaatggtgccgcgcaggtagttgctttcgagcttcatgcgctcggcgtcagtcagtttaccttcgaccaccagcgggcctggatgtttttcgctcattagtagacatctcgctgataacggcgctcaacgcgcagctcacttaaaaattcgtccgccgcttcggcgtccatcgcgccgtattcggcaatcacttccagcaacgtctgctcaacgtcttttgccatacgattggcatcgccgcagacataaatatgggcgccgtcgttaatccagcgccacagttcggccccctgctcgcgcagcttgtcctgaacgtagactttttgttgttgatcgcgggaccaggccaggtcgatgcggctcagcacgccttctttgacgtagctttgccactccacctgataaaggaaatcttcggtaaagtgcgggttgccgaagaacagccagttcttcccttccgcgccttccgccgcgcgctgctgcataaaagcgcggaacggcgcgatgccggtgccggggccaatcatgatcaccggcgtctgcgggttggcaggaagacggaagttatcgttatgctcgataaagatgcgcacttcgccatcttcttcgacgcggtcagccaggaagctggaagcgccgccggcccgagcgcggccttcgatgtcataacgcaccacgccaacggtgacgtggacttcgctttccacttccgcctgcgaagaagcgatcgagtacagtcgcggcgtcagcgggcgcagcaggtcgaccagcgcctgggcatccagctgcgccggggagaaacgcaccatatcgacaatcggcgtggtcgcggcgtaatgctggagctgtgccttatcgcccaccagcggcagcagggattcgctgcgggttaaggtggcataattttccacgatgttaccggtgttgaccgtcagctcaaagtgccactccagcgcttcggcgagcggcagcgttttgccgtcaaccgtgaccggctcctcgcccgtcagccacagcagctctaccagctctttcaccagagccggatcgttctggtaccagacgcccagcgcatcgcccggctgatagcgcaggccggagtcgccgaggtcgatttcaatatggcgcacatctttttcagaatcgcgaccggtaattttttgattcaccgccagcgtcgcggtcagcggcgcttctttggtatacgggctggtgtggatctcgttcaccgccccgctggttaccagctgagacggggcggcggcaggggcgcgcgctttcagcacctcaaccacccgagcgcgccattcggcggcggcggcctgatactctacatcagcatcaacccggtcgagcaggcgttcgccgcccagctcggccagcttattatcaaaatctttgccggactggcagaagaattcataggaggtatcgccgaggccaaacacggcaaatgcggtatcggtcagcttcggcgccttcttcgagaacaggaacttatgcagcgcgacggcttcttccggcggctcaccttcaccctgcgttgacgtcaccacgaccagcagcttttcggaggcaatttgtttgaatttatagtcgcctgcgttgaccagcttcacgttcagctgcgcggcctgcagatcgtcgcgcagcgcttcagcgacgcggcgggcgttgccggtttgcgatgccgaaatcagggtaatagacggtacttcagccgcctgggctggtgcaacaaccgccgcgccgggctgctggttcagcaccccccaaaaatagccggaaacccaggccagctgggtgggcgtgaagtcagtcgtggccgcctgaaggcgcgccatttgctccggactcagcggtagcaaattggaaggtggggcctgtgtcgtcatgcgttgttatgttccagtaagcaaagctgtgattcacgccctgtcagcgtgataaacagaagataatgtatttactctaaataattcgagttgcaggcagcgacacagcgcccatcagggcaaagcccaaggctgggccgagttattgccaacgcacatgcggctcgaagtatgacgagtgagtaggttaacggtgcaaatagtaacaactaaataaaggatggaaataacaaataaccaaatggactaacctgttttagttatagttattaacaacaaaatcgattaaataagcccatgaaatataggcaattaatttgaacaggctggatgaatgtggctattttccgctcagggccgttttagttaatgcgaaaaaatgtgctttccggtaccctacggcggttttttgccatattgagaagaaaagatgtccaccacgctgtttaaagatttcacctttgaagccgctcaccacctgccgcacgtgccggaaggtcataagtgcggtcgcctgcacggccactcttttatggtgcgcctggagattaccggtgaagtcgatccccataccgggtggatcatggactttgccgagctgaaggccgcgtttaaacccatctacgatcgcctcgaccattactatctgaacgatattcccgggctgtccaatccgaccagcgaagtgctggcaaaatggatctgggagcagatgaaaccgcgggtaccgctgctgagcgcggtgatgatcaaagaaacctgcaccgcgggctgcgtttatcgcggcgagtgatagtgcctttagctgaataagcccctgatagccctgcgctatcaggttttttttatatcacgcgatattgaggtacttgtgcgtctgcatcgacaagcgccagttgcgggcgatacaggtttcgatgcacaggcgcgtcgcgtcatctttctggctaatcggctgaagcgcgatgatacgcggcttttcatcggccagcgttgccagcagctcatccagcgcttcgatatcgcgcacgcgtccaaccggatgtttaatttcatcagcccgctgtagcgcctgagagagtacgtcatagccgccgcgcatgtttacctttggcgacaccgtcacccaggtatgcggcgtgcagcgcacttcatgggtgccgctggtttcaatctggcagctaaatccgttttgctccagtaaagaggttaacggcgttaaatcatgaatgcagggctcgccgccggtaatgaccacgtggcgggccgtccagccctgacgcccgatgatagccagcagatcttcgctgctcgccgggccccatttatcgctctctttggtttttgccagaatgctgaacagcgacacttcccgatcggcaagcttatcccaggtatgtttggtatcgcaccaggcgcaaccaaccgggcatccctgtaaacgaataaaaatggcgggaacgccggtgaagtaaccttcgccttgcaaggtctggaacatctcgttaatcgggtactgcataatcatctctgcttagggttgtgagcgcgcattatcgcagatttgcccgcgcagatcttgtcccgcgctgcgccgcgtggtgggtagaacctaaaccttaatgataaacctccggcagctggccgattccattatcccgcaccggctgatttaattagtctgataatcatcaggcgactattaagcggtacggctaaaatttttggtgtaacaaaacatgtataatcttgaaagcaaaaaataaaataacaaacttaaaaataataaatttcaacgatgtacaaatggatacacgaaataatgaatttattgtcatagcttagggtcaaattcgatccacgacgctaaatcatcttaaaataaccttaataaaccgcaccttatgttcattttccatttaatatccgtttaattttccgcgcctagaatccagtcaaccaaccataatgagactgcattcatgaatacattattaattactggcgcgaccggttttctcggtggagcagtgttagaaagcattctgaataaaaagaatgcgcctaatctattactgctagttcgtgcagataatagtgtagctgccgtagaacgggtaaaggaaaacctgcgaaaattcaatattagcgaagagagattaacggtcctgacgcccggcaacattctgctgggggatctggccaatccgcagccctttctcgacgacccgcgcctgaatcagctgacccacgtgctcaactgcgccgccgtcgcctcatttggtaacaatccgcttatctggaaggtcaacgtcgaaggtacgctgcagtttgcccggcggatggctcaggtcagcggccttgagcgctttctgcacgtgggcaccgcgatgtcctgctcgccagaccccgattcgctggtagcggaaagcacgacgtttcgtgaacgcgccgagcatctggtcgaatacacccactctaaatcaacaattgagcgtctcatgcggcaggagtgcccaacgctaccgctggcgatcgcccgtccctctattgttgttggccacactcatcacggctgtcagccctccagcagcatcttctgggtgttcagcatggggctgatgctgcaaaaatttatgtgttcgatggaagaccgcatcgatgtaatccccgtcgattactgcgccgatgcgctgctgatgctgcttaccagcccgctggcgcgcggagaggtggtgcatatttccgcgggagaggaaaacagcgtaaggtttgcggatatcgataacgcgatggcctccgccctcgagcaggcgccggtcggcgataaatacgcgcaggtcagctatgaaacgctggtcaaaatgcgccgtgaactgaaggctatttttggcccctgcaacgaacggctgatgctaaaagccatgcgcctgtacggcgccttcgccacgcttaacgtacgattcagcaacgacaagctgctcagcatgggtatgccaaaaccgccgcgctttaccgattacattgaccgctgcgtacagaccacgcgcgggctttctatcccgcagcaaatggcggtagattttaagtagccgcttttgcaggtataaaaaaagccagcccgaaggctggctttttcatatcagataaagacaggcttatgcctgacctttgatctctttacgaccgttgtacggtgctttttcgcccagcgcttcttcgatacgaatcagctggttgtatttagcaacgcggtcagaacggctcatagaaccagttttgatctggcctgcagcggtacccacagccaggtcagcgatggtcgcgtcttcagtttcgccagaacggtgagagataacggcagtgtagccagcgtctttcgccattttgatcgcagccagagtttcggtcagagaaccgatctggttgaatttgatcaggatggagttaacgatgcctttctcgatgccttctttcaggatcttggtgttggttacgaacagatcgtcaccaaccagctggattttgtcgcccagtactttagtctggtatgcgaaaccgtcccagtcagattcgtccaggccatcttcgatggagacgatcgggtactgtttggtcagctcttccaggaagtgggtgaattcttcagaggtgaacgctttgttgccttcgccggccagaacgtatttaccgtctttgtagaattcagaagccgcgcagtccatcgccagagtgatgtctttgcccagctcgtagccagcagctttaaccgcttcagcgataacagccagcgcttcagcgttggagcccaggttcggcgcgtagccgccttcgtcaccaacagcggtgttcatacctttagctttcagaactttagccaggttgtggaacacttcagaacccatacgtacggcttctttcagggatttagcgccaaccggctgaatcataaattcctggatgtcgacgttgttgtcagcgtgctcgccgccgttgatgatgttcatcatcggaaccggcatggagtatttgcccggggtgccgttcagctcagcgatgtgctcgtacagcggctgacctttagaagcagcggcagctttggcgttagccagagagacggccaggatagcgttcgcaccgaagttagatttgttttcagtaccgtccaggtcgatcatgattttgtcgatgccagcctgatctttggcatctttgccaaggattgcctgagcgatcgggccgtttaccgcagcaacagctttcagtacgcctttacccatgaaacgggatttgtcgccatcgcgcagttccagcgcttcgcgggagccagtagaagcacctgacggagcagctgccataccgacgaaaccaccttccaggtgtacttcggcttcaacagtcgggttaccacgggagtcgatgatttcacgaccgatgactttaacgattttggacattaggttttcctcagtacaagttaaactaaaactccagacaaacaatgcacccggatgggtgcattgccgttctaactcttttacttcgcctgacgcttctggtactcgcctgcggctttcacaaagccagcaaacagcggatggccatcacgcggcgtcgaagtaaactccggatggaactgacaggcgacgaaccacggatggttaggcacctcgatgatctcgaccaactgatcatccccggaacggcccgcaatacgcaggcccgcattttcaatcggcttcagcaacatattgttgacttcgtagcggtgacgatggcgttcggtaatggttggctcgccgtacagctggcgcaccaggctatcttcagccagctggcactgctgtgcgccgaggcgcatcgtgccgccgagatcgctcttatcagagcggacttcgacattaccgtcttcatcacgccattcggtaatcagggccacgaccgggtacttacagtctggcacaaattccgttgagttggcgttttccatccccgctacgttgcgcgcgaactcaatcagcgcaacctgcatccccaggcaaatgcccaggtatggaatgttgttttcacgcgcgtagcgcgcggtggcaatcttaccttcaaccccgcgatagccgaagccaccaggaatcaggatagcgtctaaattcttcagaatttcgacgccgcgcgtttccacatcctgcgaatcaatcagcttgatgttgacggtgacgcgatttttcagaccgccgtgtttcagcgcttcaatcaccgatttgtaggcgtccggcagttcaatgtacttgccgaccataccaatggtgacttcacctgccgggttcgcttcttcgtagataacctgttcccattcggccaggttcgcttccggacagtttaagctgaatcgtttacaaatataatcgtccagcccctgagatttcaacaggcccgggattttataaatggaatcgacatctttcatcgaaataacggctttttccggcacattgcagaacaatgcaattttggcacgttcgttcgccggaatagcgcgatcggagcggcagaccagaatgtcaggctgaataccgatggagagcagttctttaacggagtgctgggtcggcttggttttgacttcacccgcggcggccatgtacggcaccagggtcaggtgcataaacagcgcgttttcacgaccgatatccaccgccagctggcgaatcgcttcaaggaacggcagcgattcaatatcaccaacggtgccgccgatttcaaccagcaccacatcatggccttcaccgccggccagcacgcgctctttgatcgcgttggtgatgtgcggaataacctgaacggtggcgcccagatagtcgccgcgacgctctttgcgcaggacgtcagagtaaatacgacccgtggtgaagttgttgcgacgggtcatcttggtgcgaatgaaacgctcgtagtgacccaggtccagatcggtttcagcgccgtcttcagtaacgaacacttccccgtgttggattgggctcatggtgcccggatcgacgttgatgtacggatccagtttcatcatggtcacgttaagcccgcgggcttcgagaatggctgcgagggaagctgcggcaatgcctttacccagagaggatacgaccccgccggtcacaaaaatatagttcgttgtcatgctgaacctgagaagttaggtttaaaagacgatggaataaccaggacgggaaagcagtatacccgatcatgactgacgccacaaactttcattatccctccttttcatcaggcccacacaaacgcagggagtgagaaaatagccgcttttggcgaaatgtttttgacgtaaatcaagcgcttgttatttaaaaaatcacacaaatagcgcttgatcacgaaaactctttagagatcagtttcctggcgttttacttcctgccacacccgctccatggtatcgaggtcaacgccggtcatttccaggccgcgcgcggcgacaatccgctcaacttcgcggaacctgcgctcaaacttcaggttggctttttgcagcgcaacttcggcttttacccctaaatggcgggataaattgaccgtcgcaaacagcaggtcgcccacttcctcctccagtttagcttcatccaccacggcctgctgcgcttcgtgcatcacttcatctatttcttcgtgcactttatccagcaccggccccagagaggtccagtcaaagcctaccgccgagcagcgtttctggattttatgcgcgcgcatcagcgccggaaggctatgcgggatgtcgtccagcgcggagtgctgggacttttccgctcgctcagcgcttttgatctgctcccagcgggccagcacttcgctgctgctaccggcgctcgcctcgccgaaaatatgcggatgacggcgctccagcttgtcgctgatggcggcgcagatatcgttaaaatcaaagcgcccctcttcctgcgccatctgagcgtagaagacgacctggaacaacaggtcgcccagctcaccgcgcagatcgtcaaaatcttcgcgggcgatagcgtcgagtacttcataggtttcttcaagggtatacggcgcgatggtggcaaaggtctgctctttgtcccacgggcagccgttttccggatcgcgcagacgccgcataatgccgagcaggcgttcgatttgagtcataagtctgtcctgataaaaaaatgccgggtggcggtagcgcctgacccggctgacataagcgtgggagtttatccgccgtgcagacgacgggcgtcgatgacgtcaggtacctgattcagcttcgccagtacgcgccccagcacctgcaggttgtagatctcaatggtcatatcgatcgtcgccatctgctgtttagtatcgctgcggctggcaacgcccagcacgttgaccttctcattggcgagaatggtggtgatgtcgcgcagcaggccgctacgatcgttggcctggacgcgcaccaccagcgagtagcccgccgagtagctctctccccacaccgcgtcaacgatgcgctcgggagcatgagactgtagctccgcgagctgatcgcaatccgcgcggtgcaccgagatcccgcggccctgggtgataaagcccacgatctcgtcgccgggaatcggctggcagcagcgcgcaatgtggtgcatcagattgccgacgccctccaccaccacgcgaccattgtctttgctgcgattctgcggagcgtgggttttctgctgcagctgctttaacgccgccgcatcctgctccgccgcgctgggtttattaaactgcgcctgcaggaaattaaccatctggttgaggcgaatatcgcccccgccaatcgccgccagcagttcgtcctgctcattaaagttgtagcgcggcagcagatgcttttccgcgtccttcaggctgatgcccagatgctcgagctcatcatcaaggatctgtcgcccggcaagaatattcttgtcgcgatcctgcttgcggaaccaggcgtgaattttggaacgcccgcggctggtggtgacgtagccaaggttcgggttcagccagtcgcggctggggttgggctgcttctgggtgatgatttcaatctggtcgcccatctgcagctgataggtgaacggcacaatacgcccgccgattttcgccccgatgcagcggtggccgacatcgctgtgtatatggtaggcaaaatcgagcggcgtcgaacccgaaggcaaatccaccacgtcgcccttcggcgtaaagacataaacccggtcatcaaagacctggctgcgcacctcatccagcatctcgccggaatcggccatctcttcctgccaggcgatcagtttacgcagccaggcaatgcgatcttcataaccgcgcccgccgctggccgctgcgctggcgccctctttatacttccagtgcgcggccacgcccagctcggcatcttcatgcatctggcgggtacggatctgaatttcaatggtttttccgccggggccaagcacgacggtatgaattgactggtagccattaggcttgggattggcgacgtaatcatcgaactcatccggcagatggcggtaatgagtatgcacgatccccagcgcggcatagcagtcctgcaggcgctcggcgacaatacgcaccgcccgcacgtcaaacagctcgtcgaaggcgagatgttttttctgcattttgcgccagatgctgtagatatgcttgggacgcccgtagacctcagccttgacgccctcggttttcatttccgtgcgtaaatggctgacgaattcatcaatataatgttcacgatcgatgcgccgctcgtgtaacagcttagcgattcgcttatattccgccggatgcagatagcggaagcagtaatcttcgagctcccacttcagctggccgatccccaggcggttggccagcggcgcgtaaatattggtacactcttttgccgccagtacgcgctcatcttccggcgcatctttcacttcacgcagatgggcgatgcgctcggcgattttaattaccacgcagcggaagtcatcgaccatcgccagcagcatgcggcgaatgttgtccacctgttcagaggagaccgaatccgtatgggtggctttaagctggcgtatcgcggccatgtcccgcacgccgtggatcagggtgacgaccgatttcccgacgctctcctgcatgatctcttcgctgacgacgttgccgtccgccagcgggaaaagcatcgccgcgcgcagcgtatcgatatccatgctcaacatggagagaatttccaccatctccacgccgcgccatagcaggagatcggcctgcggatgcccctgcgttttctctcgacaataatcccaggtttcggctaagcgttcacacgactgctggctggaaattcccagactcgcgatccatttcttcgggtcaaattcaccagctttatttaaatgtgcacttcttaccgcaaccattgtcctctccttaagggaccgcctgccgaagtcggcaagcctcaacttttacacttcatccttcaaaccgcgccaacgctggcgttcgtcttttatctcagtcacctgcttctgaggatgccgcttcactgcgatttgaatgattcttgtgctcaaacaacaccattgattccagatgtccggtatgcgggaacatatcgagcatcgccaggcgttgaatggtatatcccgcctgcaataaaacgtcgctatcgcgcgccagggtcgccgggttacatgaaacatacaccacccgacgcggcgctaattttataatatgtaacataacgcccgccgcgccggcgcgcgccgggtcgagcaagaccttatcaaaaccgtgcttcgcccacgcctggcgggtaacgtcctcttccaggttctcatggaagaaagtcacattatgcaacccgttcaacgccgcgttctcctggcccttcgccaccagcgcgggaaccccttcaacgccaaccacctgcgccgcacgcttcgccagcggcagggtaaagttgcccatgccgcaaaagaggtccagcacgcgatcctgaggctggatatccagccattccagcgccgtgcgcaccatcagctggtttacgccatcgttcacctggataaaatcgcgcggactgaacactaagcgtagaccgtccgaggtataccagggggcttccccgcgaatatgttccagtatctcgctttgcggggcgaggtacagggaaagaccgtgagattgcgaaaaacgttccagcttttctttatctgccgcgggaagcgccgccgtatggcgcaataccatcagcgggccgttatccgcctgcaccagctcaacgtggccaagctgacgcaccgatttcaattcgctaagacattcacgtaccgcaggcaataacgcaccaagagtgggcaccaaaacggggcactgcaccacatcgacgatctcgctggcgttagccttgcggaagcccatctgtaattgttgggactttggctgataattcaagctcagacgcgcccggcggcgatagccccacggcgaagcggctataatgtcatcaacgtcgcgcttcatcagcctcgcgagcgcggcgcgtttgctctgctgctgcagctcaatgctggcgtgctgctgctggcacccgccgcagatgccaaaatgcgggcagcgcggcgcctgccgctgcgggctatcgctaagacggcgtttaacctgggcgcgggcgtactgctttttatcttcgaccacaacaacgtcagcctgctcctgtggcaataaaccgctgataaacagcgccttaccctgatgacgcgcaacgccctggccgaaggggtcaaggtcatttactgtaacggttatgatctggcgcgtcgtcacacgccgttttgcagagtagaattgcgccatcgtagagatttgtctcaattaaatatactgactctggataagagttcggtcaggatgagccagagtaacaacgcactagcctcctgaaagatgatgtgtatattctcccataatggaaccgcatgaccaactacagccttcgtgcccgcatgatgattcttattctggcgcctaccgttctgatcggtctgctgctcagtattttcttcgtcgcacaccgctataacgacctacagcgccagctggaggatgctggcgccagtattatcgaaccgctggcggtctccagtgaatatggcatgaatttgcaaaaccgcgagtcaatcgggcagctcatcagcgtgctgcaccgccgccactccgatattgtgcgcgccatttccatctacgactcgcacaacaggctgtttgtcacctctaactttcagctcgatcccggcgaacttcagctgccaaaaggggaaccctttccccgccgcctgagcgtggtgcgccacggcgatttgatgattttgcgtacccctattatctcggaaagctattcaccggatgaatcgccgggaagcgatgccaagatgccggacaatatgctgggctacgtggcgcttgagatggatctcaaatcggtgcggctacagcagtacaaagagatctttatctccagcgtgatgatgctgttctgtatcggtattgcgctgatcttcggctggcggctgatgcgcgacgtgaccgggccgatccgcaatatggtgaataccgttgaccgcatccgccggggccagcttgatagccgcgtcgaaggctttatgctcggcgagctggatatgctgaaaaacggtatcaactccatggccatgtcgctggcggcctaccacgaagagatgcagcataacgtcgatcaggcgacatcggatctgcgggaaacgcttgaacagatggaaatccagaacgtcgagctggacctggcgaaaaaacgcgcgcaggaagcggcgcgaatcaaatccgaattcctcgccaatatgtctcatgaactgcgcaccccgctcaacggcgtcattggctttacccgcctgacgctgaagaccgacttaaacaccacccagcgcgatcacctgacgaccattgagcgttccgcgaataatctgctggccatcattaacgatgttctggacttctctaagctcgaagccgggaagcttattctggagagtattccgttcctgctgcgcacttcgctggacgaggtggtcacgctgctggcgcactcggcgcacgataaggggctggagctgacgctgaatatcaaaaacgatgtgccggataacgtcattggcgacccgctgcgcctgcagcaaattattaccaacctgatgggcaacgccattaagtttaccgaacacggcaatatcgacgtgctggtggaacagcgcgccatcagcaactcaagggtacaaattgaagtccagatccacgataccggtatcgggattcctgaacgcgatcagtcgcgtctgttccaggcgttccgccaggccgacgccagcatctcccgtcgccacggcggaaccggacttgggctggtcatcacccagcggctggtgaaagagatgggcggcgatatctccttccatagccagcctaatcgcggctcgacgttctggttccatatcagccttgacctcaaccccaacgcggttcccgacagcgtgccaacccagtgcctggcgggtaaaaagctggcctatatcgaggccaacgcggcggcggcgcagtgtacgatggagctactggcgacaacgccgctggaggtggtttacagtccgacgatgaccgccctaccggatgctcactacgatatcctgctggccggcattcccgtatcaatacgtgacctgagccagcatcgcgataagctggaaagagccagcaagcttgccgatcacctggtgctggccctgccgtgccacgcccaggtcagcgccgaaacgctgcgtcaggacggcattgccgcctgtttgcttaagccactgacctcaacgcgcttactgccggcgctgacggcctcctgccagacgcagccgacggttctgccgccgcgttccgatagtaagaagcttccgatgacggtcatggccgttgatgacaatccggcgaatctcaagcttatcggcgccctgctggaggatttagtccagcacgttatcctctgcgacagcggccagcacgccgtcgagcgggccagagaaacgcagcaggatctgattctgatggatattcagatgccggagatggatgggatccgcgcctgcgaactgattcaccagctccctcatcagcagcaaacgccggtgatcgccgtgaccgcccacgccctggaagggcagcgagagaaattactcagcgcggggatgaacgactatctggcgaaacccattgaggaggataagctctacagcctgctgctgcgctacaagccgggaaagacgctaccgccgcaggtcgccgcggagcctgttgagccgcccgttaaccatgacatcaccctcgactggcagctggcgctgcgtcaggcggcgatgaaaccagatctggcgcgggaaatgctgcagatgctgctcgcctttatgccggaggtgcgtaacaaggtagaagaacagctggtgggagagcagccggaaggcctgctggatctcattcataagcttcacggcagctgtagctatagcggcgtgccgcggctgaaaaaactgtgtcacacccttgagagccagctacgcgcgggcaccgccgccgaggagatggagccggagtttctggagctgctggatgaaatggacaacgtcgcgcgcgaagcctgtaagctgttggggatttagaggatgtaaaacgcgagccccggtctgcgcttcgcgaccggggaaaaacctataatagccggcccattttcagcacggcggcgacgtttctcgccgtcatacgtacgttttcggcggcattttccagtgcttgctccagggtgcaaacggaataaatcacgctgaataccgcatccaggccgtgctgatgcacgacgccgacgtcagccgtcaggctcccggcaatgccgatgaccggcaggttgtagcgttttgccaccctcgccacgccaaccggcactttgccgtgaaccgtctggctatcgatacgcccttcgccggtgatcaccaggtccgcatccgccacgatatcggcaagatggagcgcatcggtcacaatctcaatgcccggccgcagctttgcgccgcaaaaggcgtacaggcccgcgcccattccccccgccgcgccgccgccttcaagatgcagcacatcaagttctaaatcgcgatggataatatcggcaaaatgggccagcgcgttgtcaaggcaggggatcatctccgccgtcgcccctttctgcggcccaaataccgccgtcgcgccctgtggtcccgtcagcgggttggtaacatcgcaagcgacgtcaatacgacagccggccaggcgtttatcaagttcgctaacgtcgatgcgcgcgaggctctccagcgcgcgtccgccggcggcaatctgctggttatctttggtcagcagtttcgcccccagcgcctgcaccatcccggcgccgccgtcgttcgtcgcgctgccgccgatgccgataataatttgcctcactccggcatccagcgcatggcgaatcagctcgccggtcccccatgaagtggtcagcaaaggatttcgccgcgccggcggtacgctctccaggccgcttgccgccgccatttcaataaacgcgcactgcctatcgcccgacaggccatagaaggcctccacgggttcaccgagcggaccggtgacggtgaccgcaatccggcatccctgggtcgcggcaaccatggcttcaacggttccttcgccaccgtcggcaaccggcagcttgacgtactccgcatcggcgtaaatttcccgaaaaccttgttctatcgcggttgcgacatccagcgcactcaggctctccttgtatgaatccggtgcgatcactatcttcatatgctgtccttaaaatgaacgattacccgacgccgtgcaggaaaccggtccccgaagggaccggtatttctttagcgcaccatgcacggacgcttgttatcaaacgtccagttcgggatcaaatactgcatgcccatcgcgtcatcgcgcgcgcccaggccgtgtttctggtacagctcatgagctttcatcacccgatccatatcgagctccacgcccagacccggtttcgccggtacctgtaccatcccgcctttaatttcaaagggctctttggtcagacgctggttaccctcctgccagatccagtgggtgtcgatggcggtaattttacccggcgctgccgctgccacgtgggtaaacatcgccagcgagatatcaaagtggttgttagagtgcgagccccaggtcaggccaaactcgtggcacatctgcgccacgcggacggaaccctgcatggtccagaagtgcggatccgccagcgggatatcgacggactgcagcgacagcgtgtggcccatctgacgccagtcggtcgcgatcatattggtcgccgtcggcaggccggtggcgcggcggaactccgccatcacttcgcgtccggagaagccctgttctgcgccgcacggatcttccgcataggccagagagcctttcaggtatttgccaattttgatcgcttcatccagcgaccacgcgccgttcggatcgagggtcacgcgcgcctgcgggaagcgcttcgccagcgcaacgatggactccgcttcctcttccccggccagtacgccgcctttcagtttaaagtcattaaagccatatttctcatacgccgcttccgccaggcgcaccaccgcatccggggtcatcgcttcatcatgacgcaggcgataccagtcgcatttgtcatcgggctggctctgatacggcagcggcgtggctttacggttgccgacgaagaacaggtagccgagcatttccacttcgctgcgctgttggccatcgcccagcagagacgccacgttcacgcccagatgctggcccagcaggtcaagcatcgccgcttcgatcccggtcactacgtgaattgtggtacgcagatcgaaggtctgcaaaccgcgtccaccggcgtcgcggtcggcgaaagtattgcgcacggcggtcagcacgtttttatattcacccagcgtcttaccgaccaccagcgggatcgcgtcctccagggtggtgcggattttctctccgccggggatttcaccgacgccggtatggccggaattatctttgatcaccacaatattgcgcgtgaagaacggggcgtgcgcgccgctcaggttcatcagcatgctgtcgtggcccgcgaccggaatgacctgcatagaagaaacaacgggggtcgaaaattgtgcgctcataatttagtccttattcaaatcagtgacggccgaaaacggggcgtttacggtcaaaagtccatccggggatcaggtactgcattgggcctgcgtcattacgcgcgccgccgggcagctttttatacgcctcatgcgctttctgtacctgctcccagtccagctcaacgccaagtcctggcgcgtccggaacagcaatttttccgtgcttaatctccagcggatttttggtcagacggcaatctccctcctgccaaatccagtgggtatcgatggccgtggggttacccggcgccgccgcgccgacgtgggtgaacatggccagtgaaatatcaaagtggttattggaatggcagccccaggtcaggccccagtcatcgcacagctgcgccacgcgcaccgcgccggacagggtccagaagtgcggatcggccagcggaatatccacggcgttcagcatcaccgcatggcccatttcgcgccagttggtggcgatcatgttagtagccaccggcaaaccggtggcgcggcggaattccgccatcacttcgcggccggaaaagccctgctcggcgccgcaggggtcttcggcgtaggtcagcacatcgttcagccctttgcacagggcgatggcttcatccagcagccaggcgccgtttgggtcgaccgtaatgcgcgcatccgggaaacgcttcttcagcgcgcgggcggtttcgatctcctgctcgccgggcagcacgccgcccttgagtttgaaatctttaaagccgtagcgatcctgcgcggcttccgccagccgcaccaccgcctcgctgttcagcgcttcctgatgacgcaggcgataccacgcgtggctgcccggcgtgctttccagatagggcagatcggtcttcgtacgatcgcccacgtagaacaggtagcccagcacggtcaccgcatcgcgctgcttgcccggccccagcagttcgcaaaccggcacgttgagcgccttgcccaacagatccagcagcgcagcctccagcgccgccaccgcgttcacccgcagttcgaacgtccaggcgcctttaccaaaggtgtcgaaatccgcggcctggttgcctttatgcacctgctgaaccactttattcaggcgggcgatttcctgccccaaaaccatcgggatcgcctccaccagcgtctgataaatcacctcgccgccgggcgcttcgccgacgccggtattgccggcgctgtcggtcagcaccacgatattacgggtaaagtacgcgttatgggcaccgccgatattgagcagcatactgtcctgcccggccaccgggataaccttcatgtccgtgataacggggctcgattgcgttgtcatgatgattgtcctgccacaggtttcagttcaatacgcttaatatcgccgaccagaaccagatagctcagcaccgccaccagcgcatggacgcccacataaatcagcgcgccgttaaacgaaccggtggtgccaacgatgtagccaatcgcaatcggcgtcacgatgccggagatattgccgaacatgttgaacagaccgccgctcagcccgctgatctctttcggtgccgtatccgccatgaccgcccagcccagcgcgccgatgcctttaccgaagaaggccagcgccataaagccgatgatcatccactccacgttgacgtagttacagaacaccatcaccatcgacagcagcatccccatcacgatcggcgttttacgcgcgatgttcagcgagccggtacgacgcatcagccagtcggaaataatcccgccgagcacgccgcccgcgaagccgcagatagccggcaccgaagcgacaaaaccggctttcagaatggacatgccgcgcgcctgcaccagataaaccgggaaccaggtgataaagaaataggttaaagcgttaatgcagtactgtccgatatagacgccaatcatcatgcgggagcccagcagctgcttaatttgcccccattttacgctaaacggcaccttggctttggccgccgcctgatccatgttgatcagcgcgccgcctgcggcgatgtaatccagctctttttggttcacgcccggatgctggttgggttcatgaatgaccttcagccagacaaagctgatgataatcccgagtccgcccataaagaagaacacgtgcgaccagcccacctcatgggtcagccaacccatgattggcgcaaaaataacggtggcaaagtattgcgcggagttaaagatagccaccgcggtgcccctctcctgcgccgggaaccacgccgcgacgatacggctgtttccggggaaagatggcgcttcggccaggccgacaaggaaacgcagggtaaacagcgcgacgataatgccgaagccgctgaagatatcgacgaagccctgcagcagggtaaacatggaccagataaaaatggaccagaagtagacgcgttttgaaccgaaacggtcaagcagccaaccgcccgggatttggccgatcacataggcccatgaaaacgcggagaaaacataccccatgccaacggcgtcaagaccaatatctttggccatctccgatccggcaatggataaggtggcgcggtcgccgtagttgaaggatgtgacgataaacagcatcaccactatccagtagcgagcattggtgcgcttttcagcgccgctcgccgcctgacttaatgaactcattgttgcactcctgaatcatagcgttagctacgttcattctgaacagcacaacctgtagggtactcagaatgacgtgttagtgtttttcattgttttcgttatatctggcactgcattgggaactggcagggaaagtataaaaagaggggctggcgggctcaccgtgcaaatacacagctttcaccggctgagtaaatgtgatttatggcgtatgcctaatgagatgggggatggttcacggaaatgaaaaaccgcgcgcgttcagaggcggaaacggcggtgcaaaaggcaggagtgtgaatcaactctcttgaccccgtgaaatagcccggtaaaggccctggcattacacaggttttaaggcaaatgcccgaagccagccacgtggagaattggtacgatctttttgaccgttaatctggctctggcattgaacatcagtaaaaaaggagcgccctctagtgtagggagagggcgaaactttttaatcgagcagcgacgcccactgcgtgacccacgggttagagacgctttcgggttccggatcttcgctggcgtcaatcatcagcatctcgccaacgcgcgtgccgccctgttcttgcaataacgcatcaaactttaggccgccgccgcagaagttagcgtaggtgctatcgcccagggcgataatcccatagcgtaaatgcggctgatacatatctttgatgccttcgtacaagggcacgatactgtccggtaaatcgccctgtccggtggtcgatgtcaccaccagcacatatctaccgctatacgactcccagtctttgacctcgggatcctcaaagactttcgcctgatgccccagcccgctcaaaatagcctgcgcctcttcggcgaccaggagcgaatttccatacatcgtgccgacaaaaattccgacttctgccatgactatctccctgaattgacctgtatctcttcatcctgaccgcagtcgtcggcaaactcaaccctttcatttagcgggagaaggccgcgccagccaaactgcgacagcgcgcgcatccagacgtcgtcaagaccggcgcgaataaccaacggttcgccggtaaagggatgcgttaacgagagctggctggcgtgcagcatcagccgatcgcagccaaagtgcgccgccgcgctgcgattctgccgcaaatcgccgtgtttgctatcgccgataatcggatggcgaagatgggcaagatggcgacgtagctggtgtttacgtccggttttcggttccagctccaccaggctatagcgggtcgtggggtaacggccggtcgccaccggcatctctaccgtcgccaggccgcgataatgcgtcaccgccggctgcgggtctttattttcgcgggcaaacttatcggcgattttatccagttcctcaaccagcgggtaatcaagcaccgcttcgtcgttcagccagccgcgagcgatcgcatgatagcgtttctgcatttgatgctgctcgaactgctgcgacagcaatcttcccgcttcgctcgacagccccatcagcagcacgccggacgtcggcctgtcgaggcgatgggcggtgaacacgtgctggcctatctggtcgcgcacggtctgcatcaccaccactttttcatcacgatccagccagctgcggtgcaccagccagcccgatggcttgttcaccgcgaccagccactggtcctgatataaaatctccagcatcaggcttcgccgccggcaaacagcgcatccagcaggaccagttcggccagcacccgctcgcgcacggggtgagcattatccagagccatctcataatagggcgcaacggcgaagttctgcggcagcggcgttccgctttccagaagctggtgcatacgcggaatcaatacccactgcagccattcaagcggctccatggtgtcgaggcaaaacggctgttcgctggcaaacgcgcggctatcgggagcactatcctgccagtgttccgtttcgcgcagcagcgcttcaatggcgagcaggcgctcgcgcacgcgatggtcaagagtcatgggaaacctcggtgagttaaaaaccggcgcagaatagcaaattcagacgagaaataaaaaaagggagcactgtataaaacagtgctcccggttcgttttgcagcaatccagctacattggtgctccctgctcgtccttgaaaacttttcctgaggtctcctgaccatgttcatccataaacagttgcatcctgctttcacaccaccccgatgcgaaataactcatccttaagtctgtcctgatcttcctgatccaccgaacgtcccgctcggctctcgttctccttcctggaggtgtccttttacgcaatcctgcgttatcctgtgcttcatcctgaagcctgtccttgcaacgccatcctggcgggtcctgcagaagcgtcatcatcctgatgttcacttcgtttatcaactccctgtcgatgtgtatagaatccctgattccgccctgtcttacaacccttgttaagacaatatcttaagattaatcgtcagtatccttaatgagaaaatcattaatcacttgaaaaatattatatttcttaaaatacgccccctgaaggatcggcttaaatgatgacgatctcttacaggtcttgtaagagatctctcacaaaagtttgggtagtgtggattacagaactggcttaagggaattaaggaaactcgcaagcgagggagaaagggtcgtccgttttcgggtgccgagggtctctttgatcacttcaccgctcatattacagaccgaaatgacctccagttcgctgtccagcgtggcgataaacagcgtgggcgacagcttcaaacgcttttgcaccagcagatgaccaatcagattctcctgcacccgctggaaatcatccgggctccaggtttgcagcagcgtcatggtttcatcggctgtttcatcggcaaaacgcgcctgcatatcgccggcaaactgagtggtataataagcatgaagcggttgttgtaccacaatctccagcgcccgttcaaccgcgtcaatattttgtgctaatgaaaacggctgcggctgccagaaaacgccgtcatcatccgtgccattgacgcacggcgacgggataccgtaaagctcttcgctgcgcggcaggctggagcgctgctgctgccacgcctcacaataacgttgggtaaatgcttgtagcgcttctgcggtttgctggtccaccggtttctctcttcacgttagacaggatacacttggcatatagtgtaaccgctttaactatggtgaaacatgtcttcttacgataatcatcaggcgctggccggcctgacgctcggaaaatcaaccgattaccgcgatacctacgacgccagcctgcttcagggcgtcccgcgcagcctgaaccgcgacccgctggatctgcacgccgataacctgccgtttcacggtgccgatatctggacgctgtatgagctctcctggctgaacgccaaaggcctgccgcaggtcgccgtgggccacgtggagctcagcgataccaccgtaaacctggtggaatcaaaaagctttaagctctatctcaacagcttcaaccagacgcgctttgccgactggcaggcggtcgaggcgacgctggcgcgcgatctcagcgcctgtgcgcaaggagaagtgaaggtagcgctgtatcgcctcgatgagctcgaaggccagccggtcgctcatctgcacggcacctgcatcgacgaccaggatattgaaatcgataattaccagttcagcgccgattacctgcaggacgccgcggccggcaaagtggtcgaagagaccctggtcagccatctgctgaagtccaactgcctgattacccaccagccagactgggggtcggtgcaaatccagtatcgcggggcgaaaatcgatcgcgaaaagctgctgcgctatctggtgtcattccgccaccacaacgagttccacgagcagtgcgtagagcgcatcttcaatgacattcagcgtttctgccagccggaagccctttccgtttatgcgcgctacacgcgacgaggcggtcttgatatcaacccatggcgcagcaataccgattttgtgccggccaccggtcgcctcgcccgtcaatagtaaacattttcacaatttgcgcgcgttaacccgcgcgcaaggttgtgaaaacgccatcagcagggctattgtaatcacaggaagacgataatcgtcctgtaaggagttcacttgattacacatgttagcccgcttggttcaatggatatgctgtcgcagctggaagtggatatgcttaaacgcaccgccagcagtgacctgtatcaactctttcgcaactgctcacttgctgtgctcaactcggggagcctgaccgataacagcaaggagcttctgtctcgttttgaaaacttcgatattaacgtgctgcgtcgcgaacgcggcgtgaagctggaactgatcaacccgccggaagacgctttcgttgacgggcgtattatccgttccctgcaggccaacctgtttgccgtactgcgcgatatcctgttcgtctacggccagatccacaataccgttcgcttcccgaatctcgatcttgaaagctcggtacatatcaccaacctggtattctccattttgcgtaacgcccgcgccctgcacgtcggcgaagcgccaaacatgattgtctgctggggcggccactcgattaacgaaaacgaatatctgtacgcccgccgcgtcggcacccagctgggcctgcgcgaactgaatatctgtaccggctgtggaccgggcgcgatggaagcaccgatgaaaggcgccgccgtcggccacgcgcagcagcgttacagagacagccgctttatcggtatgaccgagccgtcgattatcgccgccgagccgccgaacccgctggtgaacgaactgatcatcatgccggatatcgaaaaacgcctggaggcattcgtgcgcatcgcccacggcatcatcatcttcccgggcggcgtgggcacggcggaagagctgctctatctgctgggcattttgatgcacccttcgaacaagtcgcaggttctgccgctgattctcaccgggccaaaagagagcgccgattatttccgcgtgctggatgagtttatcgtccatacgctgggtgaagccgcccgtcgtcactatcgcattatcgttgacgacgccgcggaagtggcccggcagatgaaaaaagcgatgccgatggtgaaagagaatcgccgcgagaccggcgacgcctacagcttcaactggtcgatgcgcattgcgccggacctgcagatgccattcgatccgacccatgagaatatggccaatcttaagctctatccggaccagccggtggaagtgctggcagcggatctccgccgcgccttctccggtatcgtcgccggtaacgttaaagaggtgggtatccaggctatcgagaaattcggcccgtataagattcacggcgacccggcaatgatgcgccgcatggacgatctgctgcagggctttgtggcgcagcatcgtatgaagctgccgggcggcaccgcttacatcccctgctacgaaatctgttcctgagttctcttctgctcttctcccgggcggcggcttacgcccccgggctatttctccccgcccgggccgcactctttctccgctttttcgcttctccattcgcccgtatgctttccagataaatcattccttttatgaatttttagcatcgcctttacaaaagccaatcgtttgcgtttccaaaaactgcaataaatatcaccaggaaaaacgccttttaacgtaaaaacgtcgagaacttcgcatttttacagtaaaaacctcgttattacgtcgcgccactattctctcatatgctgaaaatgatagcctccgcgccacaaatctctggctgatcaccagaaacaggctgttggactaaaattgcttacatttaaagtggattattgcatttgagatcgcgatcactgatgcattcaccatataaatgtatcttcccgcaccaattgttacggagaaaatgcctaaaaaaccgtaaacaaacgaatttcatattatttggtcttttttattcaatagattttgttgcttcctccaggagatacagatggaaaccactcaaaccagcaccatcgtttcggatgctacccgtagcggttggcgtaagacggacaccatgtggatgctgggcctgtacggcacggctatcggcgcgggcgtcctgtttctgccgatcaacgccggcgtcggcggcatgatcccgctgatcatcatggcgattctggccttcccgatgaccttcttcgcccaccgcgggatgacccgtttcgtgctgtccggtaagaatccgggcgaagacatcactgaagtggtcgaagagcatttcggcgttggcgcaggtaagctgattaccctgctctacttcttcgccatctacccgattctgctggtctacagcgtggcgatcaccaacaccgtggaaagctttatgctgcaccagctgcacataacgccgccgcctcgcgccattctttccctgattctgattgtcggcatgatgaccatcgtgcgcttcggcgagcagatgattgtgaaagcgatgagcgtgctggtgttcccgttcgtggtcgcgctgatgattctggccttttatctgatcccgcagtggaacggcgcggcgctggaaaccctctccctgagcagcgcgaccgcgaccggcaacggcctgtggatgaccctgtggctggcgattccggtaatggtgttttcttttaaccactcgccgatcatctcctccttcgccgtcgcgaaacgcgaagagtacggccagggcgcagagaaaaaatgctccagcattctggcccgcgcgcacatcatgatggtgctgaccgtcatgttcttcgtcttcagctgcgtactgagcctctccccggcggatctggcggcggcgaaagatcagaacatctcgattctgtcttacctggcgaaccactttaacgcgccgatcatcgcctggatggcgccgatcattgcgatgatcgccatcactaaatccttccttggccactacctgggcgctcgcgaaggctttaacggcatggtgattaaatccctgcgcggtaaaggcaagtccatcgaaatcaataaactgaacaaaatcaccgccctgttcatgctggtcaccacctggattgtggcgacgctgaaccccagcatcctcgggatgatcgaaaccctgggcggcccgattatcgcgatgattctgttcctgatgccgatgtacgcgattcagaaagtcccggcgatgcgtaaatacagcggccacgtcagcaacgttttcgtggtgattatgggcctgattgctatctccgcgattttctactctctgtttagttaatatcccccgcgccgcctgacggcggcgctcccgacagcactggatgcatcatgatcagcgtattcgatatttttaaaatcggcattggcccttccagctcccacaccgttggaccgatgaaagcgggcaaacaattcacggacgatcttattgagcgcgggctgctttccgaggtaaccaaagtcgtcgtcgatgtctacggctccctttccctgacgggaaaaggccaccataccgatatcgcgattattatgggcctggcgggcaacctgccggataccgtcgacatcgacgcgattcccggctttatccaggacgtcaacacccatggccgcctgatgctggcaaatggccagcaggaagtggcgttcccggtcgatcggtgcatgaatttccacgccgacaacctgtcgcggcatgaaaacggcatgcgtattaccgccctcggcggcgagaaggttctctacagccagacgtattactccatcggcggcgggtttatcgtcgatgaagaccatttcggcgtgacccgcgaggcgccggtcgccgtaccttatccgtataaaaacgccgccgatctgcagcgccactgccgcgaaagcgggctatcgctctccggtctgatgatgcaaaacgagctggcgctgcacagtaaagaagcgctggagcagcattttgccgcggtctgggaagtgatgagcagcggaattgagcgcggcatcaccaccgagggggttctgccgggcaagctgcgggtgccgcgtcgcgccgccgcgctgcgccggatgctggtaagccaggacaacaccaacagcgacccgatggcggtcgttgactggattaacatgttcgccctggcggttaacgaagagaacgccgccggcggacgcgtcgtgaccgcgccgaccaacggcgcctgcggtatcgtacctgcggtgctggcctactacgacaagttcatccgcaaagtgaacgccaactcgctggcgcgctacatgctggtcaccagcgccattggctcgctctataagatgaacgcctcgatttccggcgccgaagtgggctgccagggtgaagtcggcgtagcctgttcaatggcggcggccggtctggctgaactgcttggcggcagtccgggtcaggtatgcatcgcggcggaaattggtatggagcacaacctcggtctcacctgcgatccggttgccggccaggtgcaggtgccgtgcatcgagcgtaacgctatcgcagcggtcaaggcggtcaacgccgcgcgtatggccctgcgccgcaccagcgagccgcgggtgtgcctcgataaagtcatcgagaccatgtacgaaacgggcaaagatatgaacgccaaatatcgtgaaacctcgcgcggcggcctggcaatgaagattgtcgcctgcgattaacgcccccctcccggtatgctgcggcatgccgggcttcttttccctgccctcctccttcatttatgttatataaatgataatttagttatttattagttataaagacgatttgttaccttacggaaacaccgctcaaggagaacaaatcatgctcagattatcccgcccagcgctgctgctactgctggcaggcttatccgcttccgcgctggcgaaagcgccggagaccgtgaatatcggttatcagaaagctaatatcttcgcgctgcttaaatatcgcggcaccctcgatgaaagcttcaaaaagcagggtatcgccgtccgctggattgaatttcccgccgggccgcagatgctggaagggctgaacgtcggcagcatcgacctcgccgccaccggcgatgcgccgccggcctttgctcaggcggcgcaggcggatctggtctatttagcccactccccggcgaacccaaaaaccgaggccatcgtggtggcggaaaactcggcaattaagagcgtggccgatcttaagggcaagcgcgtggggctcaataaaggctccgacgtaaactacctgctggtgaccgcgctggagaaagccgggctgagctataaagatatcacgccggtctatctgccgcctgctgacgcccgcgccgccttccagcgcggcgctattgacgcctgggttatctgggatccgttcctcgccgaagtggaaacgaacgccaaagcgcgacagattggcaatgccgaagggctggtgccgcactacaccttctacctggccagccgcaaatttgccgacacctatccggataccgcaaagcaggtggtggatgagctgggtaaactgagcgaatgggccaacagtcatcaggacgatgccgccgggatcctctccacctcaaccgggctggataaggctatctggctgaagacgctggcgcgtctgccttatggtgccgagcgtatgacgcctgcggtctataacgaacagcaggcgctggcggataccttcacccgtatcggcctgctgccggtgaaagtcgatgttcgcagcgcgacctggtcgctggataagcagtaagtcttcccttcccgggtcgcggcgcaggcgccttacccgggctaccggcccgcagacggcggtggatccgtagcccggacaggcgcgtcaagcgccgcctccgggaaaaacctcccgccccacagttcagcccctcacccttcggggagagagggaccggcaaaattaactcaccttctcttcacttccgaccgcgacctgcgcgccgtagcgatagcctgcgcccggatgcggcgcagccagccgcgggccggcgccaaacagcttctcgcgcagggttccctcgcgatactcctgcttaaacacgccgcgcttttgcagctcagggaccagcaaatccaccacgtcgcggaaggtttcgtgggtcaccgcataggcgaggttaaacccatcgacgtcggtctcttcgacccaggactgcagctcatcggcgaccgtctgcgggctgccgaccaccagcggcccgaagccgccgatccccgcccagtccgccagcttctgcacggtccactggctgttcggatcggcggtggaaaacgcctctaccatcgactgaatcgcgttggtatgcagatactccagcacctgatccggctgatactgaccaaggtcgatgccggtccagccggagagcagagccagcgccccttcgtagctgacgtacggtttatactcctgccatttagcctgggcttcacggtcggtttcgccgacgatgaccgtctgcatattgaagatcaggatgctgcgcggatcgcgcccggcctcctcggcgcgacggcgaatatccgccaccgtctttttcagcagcactttcgacggcgcgccgacaaatacgcactccgcgtggccggcggcgaactgcttgccgcggctggaggcgcccgcctgatagagtaccggcgtacgctgcggcgacggctcgcagaggtggatccccggcaccgagaagaagttcccctgatggttaatcgggtgaatttttcgcggatcgctgaagatcttacgttccctgtcgcgcagcaccgcgccatcctcccagctcccctccagcagcttatagaccacctccagatattcatcggcgtagtcgtagcgggcgtcgtggtcggtctgcgctttctggccaatattacgcgccccgctctcaaggtaggaggtcacgatattccagcccactcgacccttggtcagatggtcgagggttgaaagacggcgggcgaacggatagggatgctcaaaagagagcgaagcggtcaggccgaatcccagatgctccgtcaccagcgccatcggcgtaatcagcgccagcggatcgttgaccggcacctgcgccgcctggcggatcgccgcatcgccgttaccgttcagtacgtcatagacgcccagcacatcggcgataaatagcccgtcaaacttgccccgctccagcagacgcgccaggtcgacccaatactcgaggtctttatactgccaggagcggtcgcgcggatgggcccacagccccggcgactgatggccgacgcagttcatatcaaaagcgttcagacgaatttcacgttgtgatgacatagcactctccacggcgcgccccgctgtcgggacgcgcgcataatcattaaaggaatcaggggataaaaggcgttcagaacgccggacatcgggcggattgtttgacgcccagggtccgcagcgcttcgtcggccacggcggcggcatggtcggccacctgcggcagccccattaattctccgaaatacgcccgcgcggcgggtccggaaaccagcagattgggcgtaatccgcccttcccggcctatcgcccgcgagcggggatcgacgtccaggccaaggccgaacgcatcggcgcgaatcagcccacgctggctcagctgacgcagcagcggctggctgtcggtcaacccgccgtacgccgggccggtggttaaaataaagtggtcagcgctcacccgcagcgtttcaccgcgccggggcgtcagggttagcgccagcttttgcgcgtcgccttccagcgccgtcagcctggccgccagcacccgcaggctgccgtcgcgctggcgctgctcaaggaccccggcgacctgcggagcgatacggtagcggtgaacgtcccagtagctgcgcaaatgacgcaggaagcgctggcgatcggccaccgtcagcccctgccagatgctctgcccctgattacgcaccgcgtccagcaccacctgccaggcctgtccctgctccgccgcgcgctcgatatccagacggatttgccgcagccgctggcgcagcgttccgcaatcgtattcgccaggccagggttcactactgccgctgaggttgctgcgggacagcagcccgcggcgtgaaaatgccgcgatcggcccccgatggcccagacgcgtcagggtcgcgacggtgtccgccatcgtcaggcaggtgcccatgaccgcgacgctcgcttccggggcgatagttgccagcacgcccgctcgccaggggttagcgatgagcgccggatgcgttacgaacggcgtcgccagcgacggcagcgacggcggcggatggctgatggccagcaccagcagatcggcctgcagccgacgcccgccgtcggtgacaacttcaccatgattaacgctcagcgcctgctcgcgcagatgcgtcagccgcccgccgctggcgcgcgcctcctcggcgaaacgctgggcgacatagcggccaaactgaccgcgctgcggatagaccgcgccgtctgccagcagggcatgcgggtcatccgcaaaggcgggctggctgcggtaccagcgatcgaacgcgccctcctcttcaccggcgagctgcatccgcgcggcgggaacattaatccgatggctcggttcggttgtggagtaggccacgcccgcgccgggcacctcgcgcggctccagcagcgtgacccgcacgccaaccggcgccaggcgcaggagatgaatcgccaccgccgcaccgctaaatccgccgccgacaatcaccacgtgcggttcagtttgcatagcccaccgccttcacaaatcggtgtaacatacgcgcctcctcagcttgcgctgacctgtttcaccggacgcttatcgccgccgatggtttcgccaaacgggccggtattgacgctacgcgccttcggctgatcgtggcctgccagcggcaatagcggcatgaccaggtcagcgaaacgatgggcttcttccagatgcgggtagccggagaagataaagttggtgataccgagcgcctgatattcacgaatgcgttctgccacctgctgcggattgccgaccagcgccgtcccggccccgccgcgcaccagtcccacgcccgcccacaggttcggcgcaatacgcagattgtcgcgcgatcctttatgcagcgaactcattcgcgcctggcctgtggagtccatacgggcaaaaattttctgcgcctgggcgatagtttcgtcatcaaggtgtgaaatcagccgatcggcggcggcccacgcctcctcttcggtttcgcgaacaatcacatgcagacgaatcccgtactgcaacgtgcggccccgggcggcggcgcgctcgcgcactatcgccagcttttcggccaccagcgccggcggctccccccaggtcaggtaggtatcgatttgatcggcggcgacgtcgatggcttcctcagaggagccgccaaaaaacagcggcgggccgttttcctgtaccggcggaaacagcacttccgcgccttccacgtggatatgctcgccgtgataatccaccttttcacctttcagcaggcgcgagtagacgtcgagaaattcgcgggtgacctgatagcgttcgccgtggctgaggaaaataccgtcgcctttgttctccaccggatcgccgccggtcaccacgttaatcagcagccgaccgcccgacaggcggtcgagcgtcgtcgccatcctcgccgccagcgtcggcggctgcaggcccggacgaacggccaccagatagcgcaggcggcgggtcaacggcgccagcgccgaggccaccagccaggagtcttcgcagcttttccccgttgggatcagcacgccgtagtagccgaggctatcggccgccagcgccacctgctgcaggtaaggcaaatcaaccgggcgtccgccctccgaggtgcccaggtagcggccatcgccgtgggtgggcagaaaccagaacacgttgattttatcgtcggttttttgcgtcattatccatttcctatataaccatatccgatatttatcgaagagttgttttaatttggttatatgagtgttagcgataatcgtgccaatggtgaataaaaaattaacaatataaattcagtgagttacaaaaaaccgaaccttacgccgctgttgcaaatgccgcagccaatgcgtccggactgcggcatttgcaacagaccggcgagttagccctctggtttccgtccccggcacaggataacttcagggcatcaaataccggaggtcaccatgctgaatcctgaatttccatcctctacgcccgcgctgatcgacccggcgtcaaaagcgtttcagagcctgctggataaactggcccccaccgaggcgaccgtgctgattgtcggcgaaaccggcaccggtaaggaggtcgtcgcccgctacctgcatcaccatagcccgcgccgccaccggccgtttctggccgtcaactgcggcgcgctcagcgaaagcctggcggaagcggagctgttcggccatgaaaaaggggcgtttaccggcgcggtacaaggccatcccggctggttcgaggcggcggagggcggcaccctgctgctcgatgaaatcggcgagcttagcctgccgcttcaggtcaaactgctgcgcgttctgcaggagcgcgaaatcacccgcgtcggctcgcgcaaggccattaaggtggacgtgcgggtgatcgccgccacccacgtggacctgatgcaggccatccgcgagcgtcgtttccgcgaagacctctactatcgcctgaatatcgctctcgtcccgctgccgccgctgcgccagcgtcgccaggatattcccgtactggcggaccattttctctcgctctacgcccgccgcctgggccgcccggctcgtcgtctggccccggagacgctggcaaggctgatggagtacccctggccgggcaatattcgcgagctggaaaacactctgcataacgcggtattgctgagtaaagaagaggagatcggccccgcccagctgcggctgacgacgctgaacaatgagccctcggcggcgggcgataatgagctcgacgattttattcgtcgtcagctttccctgccgggcgagccgctgtgggagagggtcaccggggcgttgatacgcggcgcgatggcccacagtgacgataatcaaagccaggccgcggcgctgctcggtattagccgccacacgctgcgcacgcagctggccaattttggcatcattaaaagccgccgccgtcaggagcccctcttcggcccggcggtcaacagcgtctctcgcgaccgggaactgcgcatcggcttccagcgcttcggcaatcttggcatcctgaaagcgcggcaaagtctcgagcaagcctttgccagccgcggcgtcagcgtgctgtggagcgaattccccgccgggccgcagctgctgcacgctctcgcctgcgatgagatcgattttggcaccaccggcgaagcgccgccggttttcgctcaggcgagtaacggcgagctggtctacgtcgcctgggaaccgcccgctccgcaaagcgtggcgatggtcgtcccgcagcacagcgacattcgcaccattgccgacctgcgcggcaagcgtatcgcgctgaataagggctctaacgtgcactggctgctgctgcatatcctggaagaggccgggctggcattaaacgacgtcaaagtggtctatattccgccgaaatatccgctgaccgccagcgattacctggcggtggacgcctggatgatgtgggatccgctgctcagcgacgcggaatatagcggcgaattacgggttgttgccagcggcgaggggcgcgtcaataaccaccagttctacctgtcgcgccgcgactacgccagccgcaatagcgatatcatgcagcgcctgttagccgagctggcgcagaccggccagtttattgaccagcaccgggagcaagccgccggactgctctccgccgagctggggcttaacgccgcctctctgacgcgcgccttatcgcgccgcagccatcgtccgcggccgatggatctcaacgtgattcgcgcccaacaaagtatcgccgatcgcttttacgccctggggcttatccacaaaccggtttcggtgcgcgaggcggtctggtacggcgaagccaccaatagcgatctcggcctgctgatgcacgttgattagccggaaactgcgagtcatcttcctgatttccctggcggcaatagcctcatacgcgcggcgatgttaccctgaaaggcactgcaataagagcctatttatgaggatatccgtggccgttcatctgttaatcgtcgacgcacttaatctgattcgccgcatccacgcggtgcaggggtcaccctgcgtcgacacctgcctgcatgcgcttgaacagctggtggtccatagccagccaacccacgtggtggcggtatttgatgatgaagaccgcggccacggctggcgacatcagcgtctgcccgattataaagccgggcgcgcgccgatgccggagaccctcgaagcggaaatgccggcgctgcgggcggcgtttgagcagcgcgggtttcgctgctgggcgctcagcggcagcgaagccgacgatcttgccgcgaccctggcggtcaaagtggcgcaggccggccatcaggcaaccatcgtttcaaccgacaaaggctactgccagctgctgtcgccaacgatccgcatccgcgactattttcagaagcgctggcttgatgcgccgtttatcgccaaagagtttggcgtaacgccggaacagctgcctgactactgggggctggcgggcatcagcagctccaaggttcccggcgtggcgggcattgggccgaaaagcgccgcccagctgttaaccgattttcaggatctggaagggatctacgcgcggctggcggacgtgccggagaagtggcgcaagaagctggaagaacagaaagagatggccttcacctgccgggacatcgcgcgcctgcaaaccgatttacagctggacggcaacctgcagcagctgcggctggcccggtagcgccgggccgcggtgcgcgcggcttcccggaggcgatgctgcgcatctgtccgggctaccaaaccgcagacggtgagcgcattccccgggtcgcggcttacgccttacccgggctaccgcagacggcggtgagcccgtagcccgggcaggcgcttgcaccgtcccagggtgcaaagcacagaggggcagcccgtagcccggctaagcgcagcgcaagccggggaataacagcgccggggtatcagcccagcacatctcccggacgcagccggcagaagccttcgcttacggcatcactcttcgatacgcaatccgtaggttttgaatttctccagcacgatagcaatggcctcgtcgccaagaaccggcaccgggtcggtgatggccagagtgctgagataaagctgcgccagcacctcaacttcatgcgccagccacagggccttctccagattctcttcacaagcgatcaggccatggtgctgcagcagcgtcgctttgcggtttttcagcgccacggccacatgctcagacagctcgcgggtaccaaacgtggcgtagggcgcacaggggatagagttgccgcccgccgcagcaatcatatagtgaatggcgggaatgggacgattgaggatcgacaccgccgtagagtgaaccgcatgattatgtaccaccgcgtgagcatcaggccgcgtctgataagccgccatatgaaaacgccactcgctggacggcagtttgccctgttcatgctgaccttcggcatcgatatacacaatgtgcgcttccgtcagcttttcgtaaggaatacccgttggcgtgatcagcatccccccttgataacgcacgctcacgttaccggcggttccctgatttaaccccaggcgggtcatttccaggcaggtatcaataatctgccgggccagtctatttcgttccattctttacctctctttatgatgcgcaatgcgacaacagacggctcgccggagatgacgctccgacgctgttgaatagctcaaataattactcaccatcatcatcccgaataagcagaaaggaatttacatccgccggttctgtgattcctctcacttatttcagtataaaaacaaccgttcattgatttttgctttctgaaaaatgcccgttcttactaatagatttaaaaacgggcattttactgatagttttaacaactgcccgttttccacataataaaataaatcggtcatcgagcctgtgggttttacaattaactttctcaaacggtcatgtttttctgattattaaagtgatgataatcacataaaaccaccgagtggatacgaagtgtgaccgctatcatattaaaaggcttttttaatttgaaaatgaattcatgagttcactccgtgatgtttatttcactgttgatgtcgtcacaagagctcgcctgatttttgcggtctggtgggcataagccggctgctgaacacgcttctgaaccaatgaggatgctatgggaaacacaacaatacaaacgcagagttttcgtgcggtagagacagggcaaagcaagcgctacattattcccttcgccctgctgtgctcgctgttttttctttgggcggtcgcaaataatctcaacgatattttattaccacaatttcaacaagcctttaccttaaccaacttccaggctggactgattcaatccgccttttatttcggctatttcgtcattcccattccggccggaattttgatgaaaaagttaagttataaagtcggcattattaccggactgttcttatatgcttttggcgccgcgctattctggcccgccgctgaagttatgaattacaccttattcctgattggcctgtttattattgctgcaggcttagggtgtttagaaaccgcggcaaacccgtttgttaccgtcttaggaccagaaagcggcggtcacttccggcttaatcttgcccaaacgtttaactcgtttggcgccattattgcggtggtttttgggcaaagtctcattttgtctaatgtgccgcatcaatcgcaggatgtgctcgataaaatggctccggagcagcttagcgcctataaacacagcctggtgctctcggtgcaaaccccgtatatgatcatcgtcgcggttgtcttactggtcgctctgttgattatgttgaccaaatttccggccctgcagagcgacgaccatagtgacgccaaccagagttccttctccgcttcccttgctcgcctggtccgcgttcgccactggcgctgggcggtgctggcgcagttctgctacgtcggcgcgcaaaccgcctgctggagctatctgattcgctacgctatcgaagagatccccggcatgacgcccggtttcgccgccaactatctgaccggcacgatggtgtgcttctttatcggccgcttctccggtacctggctcatcagccgcttcgcgccgcataaagtgctggcagcctatgccctgctctcgatgatcctgtgcctgatttccgctttcaccggcggccacgtgggtctgctggccctgacgctgtgcagcgcctttatgtcgattcagtatccgaccatcttctcgctgggcatcaaaaacctggggcaggacaccaaatacggctcctcttttatcgtcatgaccattattggcggcgggattgtcactccggtgatgggctttgtcagcgacgcagccggcaacatccccaccgcggagctggtcccggcgctgtgctttgccgtcatcttcatctttgcccgtttccgttcgcaaacggcagctaactaaacatttatccgaataacgtgaggaatctggaatgaaaaaaatcagcttaccgaaaattggcatccgcccggtgattgatgggcgccgcatgggagtgcgcgagtcgctggaagagcaaaccatgaatatggcgaaagccaccgccgcgctgatcgcggaaaaactgcgtcacgcctgcggcgcgcagattgagtgcgtcatcgccgacagctgcattgcgggcatggcggaatccgccgcctgcgaggagagattcagcagccagaacgtcggcgtcaccattaccgtgactccgtgctggtgctacggcagcgaaactatcgatatggacccgctgcggccaaaagccatctggggctttaacggcaccgagcgccccggcgcggtttaccttgcggcagcgctggcggcccacagtcagaagggtattccggcgttctccatttatggtcacgacgtgcaggacgccgacgacacctccattccgccggatgtcgaagaaaaactgctgcgctttgcccgcgccggcttagcggtggccagcatgaagggcaaaagctatctttccgttggcggcgtgtcgatggggatcgccggttctatcgtcgatcacaacttcttcgagtcctggctcggtatgaaagtgcaggcggtggacatgaccgagctgcgccgccgcatcgaccagaaaatctatgatgaaagcgagctggaaatggcgctggcgtgggcggataaaaacttccgctacggcgaagaccagaacgcgcagcagtataagcgcaacgccgaacagagccgcgcggtgctgaaagagagcctgctgatggcgatgtgcatccgcgacatgatgcagggcaacaagaagctggcggaaaaagggctggtcgaagagtcgctgggctacaacgccatcgccgcgggcttccagggccagcgccactggaccgatcaataccctaacggcgataccgccgaagcgctgctcaatagctcgttcgactggaacggcgtacgcgaacccttcgtcgtcgccacggaaaacgacagcctcaacggcgtggcgatgctgatgggccaccagctgaccggcaccgcccaggtgtttgccgacgtgcgcacctactggtcgccggacgcggttaaacgcgtcaccggccaaccgctcaccggactggcggaacacggcattatccacttgatcaactccggttcagcggcgctggacggcgcctgcaaacagcgcgatgcggaaggcaagccaaccatgaagccgcactgggaaatcagccagcaggaggccgacgcctgcctcgcggccaccgaatggtgcccggcgattcatgaatatttccgcggcggcggcttctcctcccgcttcctgaccgaaggcggcgtgccgttcaccatgacccgcgtgaatatcattaaaggcctcggcccggtactgcagattgccgaaggctggagcgtagagctgccgaaagcgatgcatgaccagctggatgcccgcaccaactccacctggcccaccacctggtttgcgccgcgcctgaccggtaaaggcccgttctccgacgtctactcggtgatggcgaactggggcgctaaccacggcgtgctgaccatcggtcacgttggcgccgactttatcaccctggcgtcaatgctgcggatcccggtgtgcatgcataacgtagaagaggcgaaaatctaccgcccctccagctggtctgcgcacgggatggatagcgaaggccaggattaccgcgcctgccagaactacggcccgctgtataaacgttaaaaatgcctgatggtgctgcgcttatccggcctacggatgataccgttcccgtaggccggataaggcgtttacgccgccatccggcaacgtctcgggagagattatgaagaatgaagtcatcctggtcctcgactgcggcgccactaacgtacgggcgattgccgttgaccgtcaggggaatattatcgcccgcgccgcaacggccaacgccagcgatatcgccgtggagaacagcgcctggcaccagtggtcgctggaggcaatcctgcaacgcttcgccgaatgctgtcggcaaattgccgacccgctctcatcctgcacggttcgcggcatcacggtcaccaccttcggcgtcgacggcgcgctggtggataaacagggcaagctgctctatccggtcatcagctggaaatgtccgcgtaccgcggcggtgatggacaatatcggctgctttatgcccgcgcagcagctccagcagatctccggcgtcggcgcatttggtttcaacaccctgtataagctgatatggctgaaagagaaccacccgcagctgctggagcaggcccacgcctggctgttcatctcctcgcttctcaaccagcgtctgaccggcgaattcacgaccgatatcaccatggcgggcaccagccagatgctggatatccaccagcgggatttcagcgcgcagattctgcaggccacgggattgccgcgccgcctgtttccccggctcgttgaagcgggccagcagattggcacgctgcgaagcgatgccgcgaagatgctgggtttagccgtcggcattccggttatctccgccgggcacgacacccagttcgcgctgtttggcgcgggcgcggagcaggatgaaccggtgctgtcgtccggcacctgggaaattctgatggtgcgcagcgcccaggtggacacgtcgctgctcagccactatgcgggctccacctgcgagctggattgtcagccgggacgctataaccccggcatgcagtggctggcctccggcgtgctggaatggatacgccagctgctgtggacgcctgagacgccctggcaaacgttgattgaagaggcccgggccctcccccgcggcgctcagaaggtgaagatgcagtgcgacctgctatccagcccaaccgcaggctggcagggcataacgctgaataccacccgcggtcatttctacctcgccgcgctggaaggattagccgaacagctagcgcacaatctgcaaacgctgcagcaaatcggccacttcaaagcccgcgagctgctgctggtcggcggcggcagccgcaacgcgctgtggaatcagatcaaagccaacaggctggagatccccattaaagtactcgatgacgccgaaaccaccgtcgccggcgccgccatgtttggctggtatggcgtcggtgaattcagcagcccggagcaggccagagcgcaggtgagctaccggtatcgttacttttacccgcaaaccgaacccgaactgattgagggagtatgagatgctaaaaacgatttccccgttgatttccccggacctcctcaaagtgctggcggaaatggggcatggcgatgagattattttttccgatgcccacttcccggcccacagcatggggccacaggtcattcgcgccgacggcctgcgggtgagcgacctgctgcaggcgattattccgctgtttgagttagacagctacgctccgccgctggtgatgatggccgccgtggaaggcgacgccctcgaccctcaggtagaaacgcgctatcgcgaggcgctttccggccccgcgccctgcccggagatcgcccgcatcgaccgctttgctttctacgagcgggcgcaaaaagcctttgcgatcgttatcacaggtgagcgcgctaagtacgggaatattcttttaaaaaaaggagtaacgccgtaatctcatgccggagcgcccgtctgatgcgggcgctcagcgaacgccagggtgagaaaaatgaaagcggcacgacagcaagcgatactagacctgctcattaaccataacagcctgaccaccgaagccttatcgctacagcttaacgtcagcagagaaaccattcgccgcgatctcagcgagctccagtcccaggggaaagtgctgcgtaaccacggtcgggcaaaagtcattcaccggcaaagccgtgacagcggcgacccttttcatatccgtctgaaaagccactacgcgcacaaagcggacatcgcccgcgaggcgcttgcgtggatagaagaggggatggttatcgcccttgatgccagttccacctgctggtatctggcccgccagctgccggatatcgaccttcacgtctttaccaacagccagccgatttgccaggagctcagcaagcgagagaacattcagcttacctgctccggcggtacgctccagcggaaatacggctgctacgtcagcgcgtcgcttatctcacagctcaaagcgctggagatcgacctgttcattttttcctgcgagggcatcgacagcgacggcgcgctctgggactcaaatacggtgaacgccgagttcaaatcgctgctgcttaagcgagcgtcgcaatcgttattgttgattgataagagcaaatttaatcgttcaggggaggcgcggatcggccatctggatgatgtgacgcatattgtttcggacgtgtcgcagtcgtaacggctatggcagcgccggatagcggcttaacaccctatccggcctacagatcaaactagcgttcgtcgcggcgaccgccgacggcagcccacaggcggcgaacgtgaaccgtcacctcttcgcgatcgtgatacagctggcgcgcctggatttgcgcgttgatgccgtgctcgtccagctgttcctgaatataggccaggttgcgcgacagctcttcgtagcgttttttcatcggcagcttcaggttaaagatggtttcccggcaccagccgttcaccagccactgggccatcagcgccgccacttttgccggtttctccaccatatcgcacaccatccacgaaatgttgttgcgcgtcgggcgatacttgaagccatcttcacgcagccaggtcacctggccggtatccatcaggctttgcgccatcgggccgttatccaccgaggagacccacatattgcgtttcaccagctgataggtccagccgccggggcaggcaccaagatccacggcgtacataccgttcgccaggcgctcgtcccactcatccgccggaataaagacgtgaaacgcctcttccagcttaagggtcgaacggctcggcgcatcggacgggaacttgagccgcggaatgcccatatagaacggcgagttgttgttagacaacgagtaaccggtgtagcagcagccgggggcgataaagaacacgtggaccaccggacgctttggcgtttcatagttggtcagcacgcccgcttcgcgcagcgccgcgcgcagcggtaccgtaaacttgcggcagaacttcatcagctctttgctttcgttggtatcggccacttcaacgcgcagctcgccgcccttctccaccacgccctgcagcataccgacgatcggggaaatccggtcttccggcggcaggtcgcgcagcagttcgccaaccacaaacatctggcgggcaaacaccagcgagctgaacggcagttcgcgcaccagcttttcgccatcttcggcctggtagcactcaaaaatcacatagccggagtcgtctttaacccgggcaaaaccaaacacctcaaggcgcgaggccttatcggtaatttctgctgcgcactctttctcaaacccagggcgacaatagaggacaactttattcatgaacaacgcccttacgtttcagacgaattgcaccaattaacattaatatccaaccggcgaggaagcagacgcccccaaccggcgtaacgaacgcccacaggcgtaaatgcgagagcgccagacagtagaggctgccgctaaaaagaacggtaccgagcgccataaagacgctgctccagtaaaaccagatgctgatgcggcgctgcatcgccaccgccaggccaaaaatagccagcgtatggaatgcctgatactgcaggccggtgtggatccagcccatttccgcaacgcccatcgttttactcaaaacgtgcgcgccaaaagcgcccaaagccacaaagataaaaccgcttatcgcggcgaaaatcagcataaaacggctggtcatgtgtttaccctacgatgatttattgttcataacgaaagcgaaatttttcttgttcattagccgcttttgccagaatccactggcggaaggcggctattttacccagttctgcctgactgtcatgacaaacgagataaaacgcattcttactgaccagaacatcattaaacgggcagaccaaacggcccgcctcaatctcggactgcgccatcacattgttggccagcgcgaccccctgtccatggattgccgcctgcagcaccattgcgctgtggctaaatatcggtccctgttgaacattaatatggtttagacctaactggcgggtataagtttgccagtcgcggcgggaagcatcgtgcaacagggtatgttgcgccagatcggcaggcgttttcaacgctttatcgccggtgagcaacagcggtgagcacaccgggagcagatattcggcgtacagcttttccacccgcagccccggccagttgccgcggccgtaaaaaatcgccacgtcgacatcgtcggccagcttatcctcctgacggtccacggcctggatcctgacgtcgattcccggataagctgagttaaagcttgtgagccttggcaccagccactgaatggcaaaactggggagcatactgacggttaaggccccttttgcgcttcgggcctgaagcttgcgggtcgcttcggtgagctgcgaaaaaatctctttgatatcctgaaaatagctctgcccctcctccgtcaaaagaagagaacgattgcgtcgacggaacagcttgaggccgaggaaatcctccagggacttgatttggtggctgactgcggcctgcgtcacaaaaagctcatcggcggcgcgagtgaagctaagatggcgggcggctgcatcaaaaacacgtaatgcattcagaggtggcaaacgcttggacatagttattctggcttagatgttaaggcaatttaacaaacaggaaacaatagttaacctattagtttttttatctgagctattataatttgtccgttgagcttctaccagcaaatacctatagtggcggcacttcctgagccggaacgaagagctttttttggaatgcgtgttccaacaagcttttggcttacggttgtgatgttgtgttgttgtgtttgcaattggtccgggtttgcggaccatggtagctcagctaccccttttcacttcctgtacatttaccctgtctgtccatagtgatttaatgtagcaccgcactgcgcggtgcttttttttgcctgctataccgaaatcacttatccagttcgcccagctgttttacgtcagaacggttaatctgctgcttgttaccccaggcatctttgtacgaaatcatgccagtatcattatccgtttgcggtttgccgtcggtcacgatggtgcgcccatcgttggtatgcatcacgtagttggaggagcaggcgctcaggccaaaggtcagcacacaggcagaaataattgcggcagtcttattcattttcatctttctctcctttcgactatttatactgtttatgattcgttctgtaccaggttaaaacgcaaacccaacactattcagcataactatcttttacccacccgaagccatattcagaaaattccagtcgttagcagaaaccttgtatcacccgccgatttgcgcgacgatcctgatatcgatacgaggaatctcatgaacgcattcaaccccgtccaatttcgcgcccagttcccggcgctggccgacgccggcgtctatcttgatagcgccgcgacaaccctcaaaccgctggcggtcattgaggccagcgaccagttctatcgccttagcgccggtaacgtccaccgcagccagttcgccaccgcccgtcagctaaccgaacgctatgaaaacgcccgcgaacgggtggcaacgctgctcaacgccccttccggccaggatatcgtctggacgcgcggcaccaccgaagccattaatatggtggcgcagagctacgtgcgcccgcgcctgaaacccggcgatgagattatcgtcagcgaagcagagcatcacgccaacctggtgccgtggttaatggttgccgggcaaaccggcgcgcgggtggtgaagctgccgctggcgggcaaccgcctgccggacgtggcggcgcttggcgcgcttatcacgccgcgcagccgggtgctggcgattggccagatgtccaacgtcaccggcggctgtccggatctgacgctggcaatacgccaggcccgcgctgccgggatggtggtgatggtcgacggcgcgcagggagcggtacatttcccggcggacgtccaggcgctggatatcgacttttatgctttttcaggccataagctctacgggccgaccggcatcggcgcgctgtatggcaaaagcgaacggctggcggagatgtcgccgtggctcggcggcggaaaaatgattaccgaagtcaccttcgatggcttcaaaacccagcccgccccctggcgcttcgaggcgggaacgcccaatatcgccggggtgatcggcctgagcgcggcgctggagtggctggaggaaacggacatcgcgcaggcggaaaactggagccgcggcctggcgacgctggcggaagacgaactggcgaaacgtccgggcttccgctccttccgctgccaggacgccagcctgctggcgtttgattttgacggcgttcaccatagcgatatggtgacgctgctggcggagtcggggatcgcgctgcgcgccggtcagcactgcgcccagccgctgctggcggcgcttggcgtcagcggcacgctacgggcctccttcgcgccctataacacgcaagacgatgtctacgcgctggtgcacgccgtggaccgcgctctggaaatactggtggattaatgacgacttctcacccttttggtacccgcatcaccgaggcatctctacggcagacctttaccccgctcagccagtgggaagataaataccgccagctgattttactgggtaagcagcttcccgcgctgccggacgacctgaaagcgcgagccaaagagattgccggttgtgaaaaccgcgtctggctggggcacgtcgttgacgccgagggcaagctgcatttcttcggcgatagcgaaggccgcatcgtgcgcggcatgctggcggtgctgttgaccgccatagaaggcaaaagcgccgctgagctgctggcgcaggatccgctggcgctatttgatgcgctggggctgcgcggccagctgagcgcctcgcgcagtcaggggctcagcgccctgagcgaagcggtgctcgccgccgcccgcgaggttgaggtttaagcttatcccgggggcggcgcttgacgcgccttgcccgggctacgggttcgtgcggttttgtcgcccggacaggtgcgcagttttgtagcccgggtaaggcgcctgcgccgcgacccgggaatttacgccgtctgccgctccgccttcgccagcattttcttcagcgcgtgggagacggcgacaaaaccaaaggtcgcggtcaccatcgtcgcggcgccaaagccggatgcgcagtccattcgcttcggcccctcagcggtgcttttcatcgcacaaacgctgccgtccgcctgcggataaaccagcgcttcggtggaaaacacgcaatccacgccgagcttacctttgctgttcttcaccaccccaaactggctcttcaaacgctcacgcagctttgccgccagcggatcctggatggttttcgccagatcggcgacctgaatttgcgtcggatcgatttgcccgcccgcgccgccggtggtcaccagcggaaccttatggcgacgacagtaagcgattagcgccgctttcgggcgcacgctgtcgatggcgtcaatcacgtagctaaagccaacgccaagatactcggcgacgttttccggggtgacaaaatcgtccaccaccgtgacccggcactcggggttgatcaggcgaatacgttccgccatcacctcggctttcgccaggccaacgttgccgccaagggcgtggatctggcgattggtgttggtcacgcagacatcatccatatcgatcagggtaatcgcgccaattccggttctcgccagcgcttccgccgcccatgagcctacgccgccaatgccgaccacgcagacgtgcgcgtcggcaaaacattgcagcgccttttcaccatataaacgcgccgtgccgccaaaacgctggcgccaggcatcgctgattacaacagacataaaacctcagaattagtggacattcccgggtcgcggcgcaagcgccttacccgggtgacaaaatcagccgtagccccggtaagcgtagcgcgaccggggaaaagaaccggcgtactagccgctaaagacgttgcccgcgcccggggcgtttttcagcacccatacgcggccgtagtggttataccagccggcacgatgcccggcatccgggccaatgccctggtaaatatcgaagtgctggcctttaatcgccccgccaacatcgagagccaccattaaacgcagctcgtactggccgttaaacttgccgttgttatccagcagcggcacctccgccagcagcgtggtgccggcaggaacaatggaacggtcggaagccaccgatgcccggccaatcagcggcaccgcgctggcgcctttcaccggcgcaaaagactgcggtttaaagaagacgaacgacgggttctgctccagcagctcgcgcacttccgcctcgctgtgtttttcgccccattcgcggatcgcctgcatcgacatatcttcgcgcttcacttcgccgcggtcgatcagcactttaccgatgctgtagtacggccagccgtttttcccggcatagctgaagaagttcagcggcgagccgtcgccaaaatcaatgtaaccgctgccctgcacgtccatgatgaagttatccatcagcgagttgctgtaggccaggatgtagttgtcgctcagagcgccggcgtagatgctggcgcgggacggcagcttgccgcgcttcggcggcatccggtaaatcgggtactggaactcgccctggcgagtatggcgcgcctgcaccaccggcgtgtagtagccggtaaactggacgttaccgtagttatccgtcccctgcatctgccaggcgtcgataccaaactggctcagcgtgcgggtgtcgccgccggaacgcagccactcctgaatcgcattgtagacgttgctctggctggtgtagaggcgcggagaggcgctacgaatctgtctcacctgctcggagaaatcgccggcgttgatcggcgagccgaccgcatcaggttggttaaccaatgaaaacggctgggtgagtttaccttcattatactgctgaccgcgatcggtcggttttgaggaacaggcggccagcattgccagcattgcgcctgttactgcgtattttgcccaacgtcctttcatggtatctcttctttatgctgctaagcccgggtgcgtgatgaagataacaaacccccagggctaatgaaatgcgcttaggcaccgcaaaggcagttttgcgcaaaaaataggctggaagtgattctatatgcaccattttttacaaaattgatgatttctgccaaaaagggttgcatcaaaacgttagcggagtatagtgcgcttccacggacgcggggtggagcagcctggtagctcgtcgggctcataacccgaaggtcgtcagttcaaatctggcccccgcaaccaattaaaatcagagaagtaacgttactcgatggaagagtaatgacggacgcggggtggagcagcctggtagctcgtcgggctcataacccgaaggtcgtcggttcaaatccggcccccgcaaccaattaaaatctgatgcaagtttactcgatgaagagtaaagacggacgcggggtggagcagcctggtagctcgtcgggctcataacccgaaggtcgtcggttcaaatccggcccccgcaaccaacatcataaacaccctcaagggtgtttttttgtttctgcgctccgcaaaatcttatgcctgattcagggaacggcgcagcgccgctccccagccctttctcagccctttggcaacacaatattgctcgccgccagcatgcccatctcgtgatacatcgcgcaggccgcttccacgatcggcatcgccagcgccgcgccgctgccttcgcccagacgcatccccatattcaggtagggctccagttcgagatgcatcagcgccgtacgcgcgcccttctccgccgaatagtgggacgggatcagatagggcttcacttccggcgcaattcggcacgccgccagcgccgccgcgtaggagagaaagccatcgagcaccaccggcaggccgcaggaggccgcgcccagcatcacgcccgtcatccccaataaatcaaaaccgcccacttttgccagcacgtcgagaccatcgttcgggtcaggccggttgacggcgatagcccggcgcaccacttccactttattagcgaccttcgccaacggcagattagcgccaatcccgaccacctcctgggcatcgctgccggtcagaacgctgacaatcgccgccgccggggtggtattggccattccgagctccccgacgccaaacagggtgacgccatcctgcgccagccctcgagtatggcgcatcacctccagcagcagctcttccgcctggccgcggtgcattgccggaccgacggcgatattgccgcagccgcgcgccacgcgcatgttgataacgcccggaatcagctcagcatcgatcccgacatcaatcacgtgcattttcgcgcccgcctgcgccgccagcacgcaaacgccggttttccccagcatcatattcgccgcctggatggcggtcaccgctttcggcgagatggcgaccccttcgtcccacacgccgtggtcggcgcacatcaccagcagcgccttctttttcacctgcggcacgccgtcaagaccgggcatgcccgccagctgtacggcaagatcttcaaggcgtccaaggcttccgggcggcttcagcaggccgtcgatatgaagccgggcgcgcgccatcgcgctttcatcaggcgccgggatcgcgcccagtagagaggttaagctttgcatagaggttctcgtcttgttggctggctcatggcagagccagcaggaagaataacgcccggtacggcgcgcctggcctatttgatttttacgccaatgcccgacaccaccagccacacctcgtccgccgccgccgccaggcgctggttaacgcgcccggcgatgtcgcggaaatggcgggccagacggttttccggcacaatccccatccccacctcgttggtcaccagcaccacgcgggccgggcagcgctggcaggcggcaatcagtaccgcgatttcggcgtcgatcgcccgctccatcgccgcataatcccagtcgtccggcgcgctgtcgccccccagcgcaaacagcaggttggttaccatggtggtgatgcattccagcaaaatcgcctcctccggggcgatatccggggtgatcagttcatcaagctgctgccagcgctcggcggtgcgccagtgcgcgggcctgccgtcgcggtggtgctggatcctcgccgccatctcgtcatcaaagatctgcgaggtggcgatatagagtacctgcggcgcatgggcgatcagcgcttcggcatggcggcttttaccgctgcgcgccccgccggtcactaatgtcagcatacgggctcctgatgttggcgcatgatggcgtagattttttcgatatcaatatgctgacgcatcgcgtccgccagcagatcgaactggcgagatttatactgcgcatactcgaaatcgctatccagcgccgccagccctttacgctggcgcaggccgttaaccagcgcgcgggtaaatgcatcgctatcgaacaggccgtgcagataggtgccaaacgccaggccgtcatcgctgaccgcgccgtccgccacattctggccgcctttatgtaattgcatcagcgaacggcagccgtcgcgcagctcggtttcgcccatatgaatttcgtagccgcttaccgccagccccgccgttgccgccagccacgccggcagcgccggagccagagtcgccgttacctgggtggtcgttttgctgtgcgcaaagtgggtgacggtattgagcaaccccagccccggctgggtgccaagccccgactccacctcatcaataatggtttcgccgagcatctggtagccgccgcagatccccagcaccggtacgcccttacgccgggcctgcagtaccgcgtgcgccatgccgctctcgcgcagccagcccaggtcgccgagcgtatttttactgcccggcaggataatcatatccacgcccgccagctcctggggctggcgaacatagcggacgcggacgtccggctgcgccgccagcgcgttgaaatcggtgaaattagagatgtgcggtacctggaccacggcaatctcaatatcgcgcctgtcggtacgcagatatttccctttttgcagcgcgacgccgtcctcatcttcgagatcgacgtccagccacggcatcacgccgagtaccgggacgccggtgagcgcttctatctgctcgatcccggaatacagcagcgccacgtcgccgcgaaatttattgataatcacccctttgacccgcgcgcgctcgcggtcatgcagcagcgcgagcgtgccgtagatggaggcgaatacgccgccgcgatcgatatccgccacgaggatcaccgggcactgggccatctcggccatgcccatattgacgatgtcgcgatcgcgcaggttgatctccgccggactgcccgccccttccagcaccaacacatcatgttcggcggccaggctgttataaaccgcgaggatctgttcgcgcaggcgcggcttgtattcgtgatagctcaccgcgtccatatcggtcgccactttgcccatcagcaccacctgcgctttacggtcgctggttggcttaagcagcaccgggttcatgcgcacatccggggtagtgcccgccgcttcggcctggaaaatttgcgcgcggcccatctctttgccatccggcgtgataccggaattaagcgccatattctgcgatttaaacggcgcggtgcgctgcccgtcctgataaaagatgcggcacagccccgcgaccagcacgcttttgccgacgtcggaagcggtgccctgtaacataattgccagcgtcatgacgcctccttcatcgcgttgtttcgcatccgcgtaaaaaattcttcttcggttttacacagcggcagcccgagctgcgcgtgcagtttcaccagccacggctgggtgagcccggcctgggccatcagttcgctgcgggcaaacacctccccgggttcgccatgcgccagcacttcgccgcggcgtaacacgtaaaccgcatcgctgatttcatagatcagatcgatatcgtggctggagatcgccacgtggttgccccgatcggcaatgcgcttaatgatgtcgatcatctgcgcgcgtcccgagggatcgagccccgccgtcggctcgtcgagcagtaaatagcgcgcctgcagcaccagcgcgccggctatcgccacgcgctttttctgcccgtggctcaggcactgaatcggctggtgacgaaacccctgggcatcgacgagagtcagggcatcgtccacccggcgggcaatttcctcttccgcaacccccaggttacgcaggctaaaggcgatatcgctgtcgatatcggtatagaaaatctgctggtccgggtcctggaaaacggtcgccacctgctgacgcagcgccagcaggccgcgtttgctgtaatccagcggttttccctgccacagcaccgccccgctctgcgggcgcagcagaccgctcaggttcataaacagcgtggattttccgcagccgttcgcccccaccagtccggtcaccgcgtgacgggaaaaatccagcgtcagccccttcagcaccggctcgtcctgatagcgaaaccagagatcggtcgtggcaagcatacttatccttagaggtgaaagtcaccctgatacagtttgatatccagcgtggtgctcatctgctggtagcggatcatcacccgggtaaacagcagccctaccagcatcgccagcgaacgatagcccttcggcacgctacggtagccaaaacgtaatgtttgcgcacgatgaatcgccagcgcttcgtctaacagaataaaaataaagcgccaggtcagcaggatttgctcggtcagcagccgcggcacccgcccgcgcttgagcagcacaataagctgcgggaacggcagattcagcaccagccagaaggtggacgccagcgccgccaggctgcgccagaaggtctgattggcggtcgtcagcccctccgacgtgatgcccagccagacgctgcccagcggcaggctcagcagcagatcctgcggattgcggctgacgctaaacagaatggtcagcacgccgatcagcaggaagccaaacggcagcgccatccagcggcaccagcgccacggcgagacccgcagcagccagcaggttaaggcggcaatcagcgccatttcgataccctgccccagcggaggcagggtaaaggccagcaccatcagcagcagccagaacaggaacttgcgctccggcgcgacgtgaaaccagcggctctgatagctaagtcggtcaaacccggtcatcacggcgctgtctgcctttgctgtagcccagaatatagaaaatcaccgccgcgccgagggagccctggagcgtaaacagcaggctctcaatttctccactcgccggttcgtacagcggctggaaccacggctcataatgcggtgcgaccacctgaatctggctctccgcctcgccgtccgaaccgccaaactcgccgccgtgatcgacaaagaacggcaggatcaccagcgccaccaccatggctaacaatatcagcgtctttttcatgttaatgcccctgtgcggtaatcagctgacgtttggtcaactggtcgtagatcatgacggttaacagtccttcagcaatggcgatcgggatctgggtcaggcagaagatccccataaacttgacgatcgatccggtcgcgccggcggtcggatccgggaaggccacgccgagctgtacggaggtgacaaagtaggtcaccagatccgccagcatcgcgcagagaaacaccccgacatcgcggcgaatgcccgcgcggcaggccattttccacaccatatagccgaccaccggcccgatgaccgccatcgacatcccgttcgcgccgagcgtcgtcagcccgccgtgcgccagcagcagcgcctggaacagcagcacgatggcgccaaggatcgccaccacgccaggcccgaagagaatcaccgccaggccgacgccggtcgggtgcgaacagctgccggtcacggaaggaattttcagcgccgagaggacaaaaataaacgccccgcacagcgccagcagcaccttctggttgttatcttcctgcacgatgcggcgcaggcgcaccagcccgtaccacaggcagggtaaaaacagcagccaccatgccagggcccacatcggcggtaaaaacccctccataatgtgcatcgcgaaagccttttcgggtaccactatcagcaatagcgccgcagctaacccgctgaaagacagctgttttagctgttgttcaagtttcattctgcatactcccactgtttattgaccagaatggtcgagaaatagggcagcggctggtcgtcgctgacgtcacggagatggcgccagcactgctcgcccggcagcgtggcttcggacatcatcagcgcggcatccagcagaccgtttttcgccagcagcgctttgatgcggggaaaccgcccgtacactttcatcagcaccaggctttcatgctggcgcagcgcctgctcgatttccgtttccggcgcggtgcaggagatcaccgccagcgactgctgctccatagccagcggcgtttttgaacgcgcggcaatggcggcgaaagaggtgacgccgggaacaatctccagccacgccgggctgccgatacgctggagtaagaacacccaggtgctgaacagcatggcgtcgccgagggtaataaacccgacctgcttgcccgcctccacttcctgcaccagcgcggcggcgacctcatcccataccgcctctttttccgcgctgtcggcgctcatcgggaaatggcagcagcgcacttcggtccgttcgccgatatactcccgcacgatggagagcgcgaggctgtcgccgcctttacgtccggcgggggcgtagagaatgtccagcttgcccagcacccgcgccgcgcgcacggtgatcaggtcggcggcgccagggccggtactcagggcatacagtttgccgctcatgccgcctcctccatcgccaggctcagcgcctgctgcaggtgagcgacgaacattgcgcgcaccgccggattctctcccagcccgttcagccacggcgtcgccgtgataccggcggcgttgaacagcgttttccaggagtcctcttcgtccgaggccatatcgttaatggcgtgatcgccggccaccagcatcagcggcatcaggtgcacgcccttcaccccctgccggcgcaggctgtcgataagaatatcgacttccggatagctctcgaccgcgccgacccgcgccggaaaccccttcgccgtcatcatatgatccagacaggcgtaggcggcgaaagcgtgatggctggcgccgtggcccataaagaccaccgtttcatcggcggcaagcggcggcatctgctggcgcagcgcctgcatcagctggacataatcgtgatggctgctcagcagcggcgcccccagcgtcaggcggaggaacagcgggcgcaggctttgcacttcgcggacgatcttttcatattcatcgccgttgataatgtgcagcgactgaatcgccacatcctggtagccctgctcggccagcttctgcagcgcctgcagcggcgtatcaatctcgataccgtcgcgctgcttgagcttgcggataatcatcccggaggtgaaggcgcgaaaggtgtcgcggtccgggcagctggccgccagctcgcgctcgcaggcgacgatattcttttcacaggtgtcgggatagctggtgccaaaactgaccaccagaagcgcttttttcatttcggactccttaagcagcggccagccagcgcgctaagcgccgggcaaaggcagcctgactttccagtaattcttcaccggtcaccagcggtgccgggcgcgtaatcacgatgcaggggataccggcatccagacagggttgtactttttcctgatagccgccttcggccccggaggctttggtgatcaccacatcggcccggcactggcggtagaaagcggcgttgaactcggcgctgaacggcccgcacagggcgaaaatctcgccaacgccgaaccccagtccggcgcactgggcgatgacatcggcgaccggcaacacccgggccagaagcgttttttcgcctaatcccgcccgccagcgcgccagatctttgcttccggtggtgagcagcacgcgaggaccgaagcgccgggcgacctcgcaggcctgttcaatgctctccacggtatagagcagcggatgcctcaggccgctcagctgttcagggcgctgatagcggctcagcagcacgccggcgatttcgcaggcccggacgatattgcggctcaccgcttcggcgtaggggtgcgaagcatcgatcacccagcgggtccggttagccttcagccaggcgatcatctcctccagctcgagacgcccgcagcgcacctggccgcgaatatcccccgccagctgctggccggtgggcgtcgccaccgacagggtgtatttaacctgcgccgcgtcaagctgctggcacagcgcccgcgcgtcgctggttccgcccatcaccagcacctcgccgtggctcacagcacgtagcctcgcggggtgatcatcaggccatcctggatatacgtcgctttgttgccaacgatcaccaggctggtcatatcgaccggtgcaaaatccatctcccccagggtggtcagccatttctcttgttttttacgtccggcggacttcacgacccccaccggagtctgcgcgcttttgctggccgacagcagctcaaaggcgcgcgccagatggccctcgcggccgcggctgcgcggattgtaaaaacagatcacgaagtcggcttcaccggcggcgacaatacgcttttcaatcaccggccacggtgtcagcaggtcgctgaggctgatatggcagaagtcgtgcatcagcggcgcgcccagcagcgaggcggcggcgatgctggcggtcatccccgggatcaggcggacttccacatccagcttctgcttgctgaccagctcaagcaccagtccagccatgccgtaaataccggcgtcgccgctgctgatcagcgccacgttatgcccggcctgcgccagctcaatcgccgcctggcagcgctcaatctctttgcacatcccggttttgatcacctgcttatcgccggtaaaggctttcaccaggtgcgtgtaggttttatagccaacgacgatttccgccgcctgcagcgcttcaatggcttccatggtcatcatggactgcgagccagggccgattccgattacgcttaacatcagtgtgaaactcccaaagtgatagtgacgccctgttcgcgcagggtttcgcccaacagttgcccatggctcagcagccaggccgccgggccggatacgctccccacgccgacggtttttctgacgaacgatgaagcggggaaatggtgctcatgctcgcgcagcgcatcagcgggaaaggtttcgaacggtacgcgacagcaggaggccagctgaatcagcccctgctcgtgcttcttcagcgtcacgctgccgatggctttcagcgccagcggatccaggcgctgcgcctcaagctggcgcgccagcagcgctgctaacagcgggaatggcgtatcgcgacggcagccaattccggcgaccacccgctgcggcaccagcttccagtgcggcacggcgatggccggcagctcgttgcgcagcgtgacgcagaccagcgcgtccagctcgggaagctggtgcagatcggtcacggtgataaatccccgccggtcgcagcggctgacgtcttcatccagttcgtcgtcccaccacaggccgacgcgctgctggctgaccagcatctggttgacggttttcaccgccgcgcggaaatcgctcatccgggcattaagctggaatgccagggtatccagcgccgccatctcgttgacgtcggtggcggtggtgatcaccgggtcggcgccaagcatcccggccagatagcggctgagggcattcgcgccccccgcgtggccggaaagcaggctaataacatgctggccgcgctcgtcaatcaccactaccgccgggtcgctgaacttgtcattcaccagcggggccagtacgcgtaccgcgatcccggtggcgccgatgaaaatcagcgccgaatagctgctgaaggcctcgcgcgcggcgctggcaaaaccgttttcaaaggggagaaacccctcttccagcagcttctcgctggtaaagcaggttaacggcagcatcgccgccagccgtttcgccagccgcacgccgccaggggtcaggcagaaaagcgcgattgattcaggctttacggtattcatggctaaagtccgccgcgtagagttttgagtagtgatactcagagcccaggaaattcccgaccagaatgagcgccgttttgcggatccccgcctcgcgcaccttgtcgccgatatccgccagggtaccgcgtacggtctggctttccggccaggtcgctttgtagatcaccgccaccggcgtggttgccgggtagccgccttccatcaggcgctccgccacccggtgaatgcgctgtacggaaaggtaaatcgccatcgaggtctggtggctggcaaacgactcaagctgctcgcgctccggcaccggcgtgcgcccttcgaggcgggtaataatcaggctctgggagacttccgggacggtgtattcgacgccaagctccgccgcggcgcccagaaacgcgctgacgcccggcaccacctgccagtcgatgccgcgtttggtcagctcttcgccctgctcgcggaccgagccgtacagcgacacgtccccggtctgtaaacgcaccaccgttttcccggctttaacgccggcttccatcaggtcgagaatttgcgccagatgcagttcggcgctgtcgtgacactcggcgccgggcggacagtactccagcagcgcggtgtttatcagcgacccggcgtagatcaccacctgggcctgctggagcaagcggtagcccttgagggtaatcagctcacggtcgcccggccctgcgccaacgaaccacacacaacgggggtcaaatgtctcagccatggttttcttccttctgacaggcgataacaaaaacgggattattcggtttgaaatagtggccgctgcccagcgcggtcagcgatgaaacgttcagctgcagggaatcaacctgttcgattcccttcagccgcagatagtcgagagcggcgttcaggttctcctggaggataaaggtcatcaccaggcgaccgccggggtagagctgctgccacgaccagtcaatgagctcgtcgaggcggccgccgctgccgcccataaaaatggcgtcggcccgctcggtgatcaccatcggcgcttcgccgggcaggatctcaatgttgccgcaggcgaaatgctggcggttttcgtccagcagctgcagggccgcgggattgcgttcgaccgccgttacctgcagcgaggggtactgcaacgccgcctcaatcgacacgctgccggtaccggcgccgatatcaatcaggtggcttgcccggtgtagctcaagtttggccagcgccagcgcgcgaaccgcctctttggtcatcggcaccttctcgccgcgcagaaaaagctcatctttcatcgaggatcaccaccgcgttcatctcatattcgccgtcgacctcactgaccggtagccagcggatccgctcgttatccatcgccagattttcgccaatcaccatccagcgataccctttaccccgcgccgccagctgggcggcgatttcccgcggcccgcagcgcccatcggtcaccatcgccaccttgcgctggcgagccagctcatcaaaacagacgtcccgcccgtggctgctggtcagccagatatcgttcatatcgataccggccttcgcgcagagatactgcaccgcgctgatgccggggataatgcgcacgcgctcgatgccaaagtgggcgatcagccgcgtaccgatgccgtaaaacagcgggtcgccggaggccagcaccaccaccttctgcgcttcgcgttcgccgagccataacagcagttcggcaatattggcgcccagcgcaaaccgttcgccgtcaaactcagggaactgctgtaaatgccgcttgccgcccaccagcgcgtccgcgctggcgaccgcgtcccgcgccgccggcgtcatcagatgcagacctgacgggcccatgccgaccaccgttaacatgacatctcccgcgcaatgtcggcgatcggccgattgctgccgaggaccttgttatcaaaggagaacatgatggcgtcgcagacgggcggcgttttggtaaagcgcagcatctgcatcacccgcaggcagatgcgttcggcaagatgatgatagatatgctgaaaaccgtacgcgtcgatgtgctccatcgccgcttcggtggtatcgcattcgctcaccagctgcagcagcgccagcggcgcgcccagcagcgccagatgcgcgaccagggtttccatccgcgcatcggcgatatggctgtgggtgtggaagatcccggcggcgactttaatcagcttgccgggatggccaatcagcacgatctggcggaaccccaggcgcacggcctcttcaatcatgtagccgacaaagttgctcatggtgaccaccacctgcgcatcaatgcccatctgctcgcgtacgaagcgctcgccgtggttgcccggcaccagcaccacccgctccagccccgccgcgcgcttaatttccagctccagcgacagcgaacgcttccagctctcctccgacatcggcgtcacgataccggtggtgccgataatcgagatgccgcccaggatccccagccgcgagttataggttttctgcgcccgcgcctcgccttccggggcgaaaatctctaccgtcgccccgcgcgacgggccaatcgcctcgcgcaccgccgactcgatggtgtggcgcggggtgcgattaatcgccgggctgccgatgggcaggccgatccctttgcgggtgaccgtgccgacgccttcgccgccgcgcagggtaatctcgccggaatcgtcgagcgtcacgcgggcgaaaatcagcatcccgtgggtggcgtcaacgtcatcgccgccgtctttacggatggcggcgatcgcctgctgcccttcaacgtgcggcgactcgacgttaaggcacagggtgatgccggaaggggtgacaatggagacctgatgaatcagatgctgacgcatcaccatcagcgccgcgacctttgctgccgccgtggcgcaggatccggtggtatagcctttgcgcagcgccttgccgttgtgccataccggggcgtcaaaggattgctcgctcatcgcgccccctgtaagtggtacaaaatggcgttgacgatggcggcggcgacgttgctgccgcctttacgacccagcgcggcgatgcccggcaggccgctctgcgtcagggcctctttcgactccgccgcgccgacgaaaccgaccggcacgccaatcacgccgttgaccgcgacgtcatgctccagcagacgaaacagcgcggtgggcgcattgccgaaaacaaacaccttctcgccctcttcggcgaccgcgatatcaaccgccgccatcgagcgggtcatcccctgcgctttggcctccgccaccacccgcggatcgctgatatagcagcggcactcgccgccgaatttcgccagcagggttttattgatcccggacagggccatggtggtatcggtataaagcgtgcagggctggctcagggcggcgctcaagcgcggaagcacgtcgggcgaaaaccacaggatatccagccagtcaaaatcagcggtggtgtggatcacccgcttgataatggcttcgtgcagcgggctggcaaagcggtagtccgggcgggtctgcgcaataatgtcgccaataatgtcgaagcttttcgcctcaatcgcctgcggttgctggatatagtgcattcatttgtcctcaggcagcgccgaccagccagtaccggaccgccataaacagcgccagcgccagggtcgaagacacccacatcagtcgaatcgttcgggaaatatcgtctacggaaatatcgcgcgtcgcgtcgccgatccacggtttctccacgcgctgtccaaagtaatcattagggccgccaagccggatgccgagcgccccggcgaccgccgcttccgaccagccgcagttcgggctgctgtggttgtagcggtcgcgccagccgatgcgcagcacgcggccccccgcttcaccgcagaggagagcagcgaggctgataagcagccagctcaggcgggcggggataaagttggcgacatcatcgaggcgggcgctgaccatgccgatggcccgatatttttcgtgcttatagccgaccatcgaatccagggtgttgaccgctttataggccatcgccagcggcgcgccgcccagcagcagaaagaagagcggcgcgataatgccgtcgacggtgttctccgcgacggtttccaccaccgcgcgattaatctgctgcggcgcaagctgcgacgtgtcgcgcccgacgatccacgacagcttgatacggctctccgccagatcccccgcgcgcagcgggcgctcgacgtcccgcgccgactgcgccaggcagcgtccggccagcacggtgaaaatcatccatacctcaaccagccagccaagccacggatgaatcgtccgcgccagcgtcagcacgccccagcagacgctccacgttagcccgaccaccaccagccacatcacggcgccgccgacgcgcagggcgacatcgctgcggcaatagcggcgcacgccgcgctgaacggcggcgatcaggttgcctatccagcgcaccggatgcggccagctctgcggatcgccgatgataaaatcgaggagccaggcaacgccccatgccagcagcgtcatagcgcgctccttgccgcagccagccagtggttgagcatgatgggacgctgcgcaaagtgcaggtgcagatagctggcgaacgtgttgcccacctgccagccgcccgaccactgctgaagggtcataccgtcgcggactttgcggcaggccaggaccgccgggatctccggggtaaaatccgagtagtgaaactcatgcccgcgcagggtttcgccgggcgccgccagcagcgtttgccgcatcgcccgcgcctcgcagtagccaaagcgggtaagccgtttgcccatcttgctgtggccgggaatcagattggccatcgaatagatgtcaccgctggcgtcttcaagggtgctgccgagatacatcaaaccgccgcactcggcgtaaatcgccaccccgcgccgctgcgcctcccgcagctgcgccagcatcgacgtattggccgccagcccggcggcatgaatttctggatagcctccgccgagccaaatcatctggcacggcggaagctcgctatcgcgcagcggactgaagcgcacgatattcaccccgcagcgttcaagcagcgtaaggttatccgggtagtaaaagttgaaggcttcgtcgtcggccagcgccagcgtcaggcccgcgccggcgtcgggcgacggcagcgggggccactccccggcgggtagggcggtgagctggctaagagccaggagccgttcaatatccagcgtttgcgccagcgtttgggcaaaatcgcgccacggctgctgattgaccagcgactcgcgggcggtgaccagccccagatggcgttcgggtaacgccaccccttccacgcgcggtacgtagccgagcaccggcagcccgcaatagcgttcaatggcgcctttgagaagctgataatgggattcgctgttgacgcgattgacgataacgccggcgatattcaggctggggtcgaagtgttgaaatcccatcaccgtggcggcgatggaggtggaaaccgcttttccatctaccagcaaaatgaccggacagccgagctgtttagccatcgcggcggtgctgcagtagccagggtcggtaccgaagccgtcatacagccccatcacgccctcaatgaccgcgatatccgcctgctgcatccgttcgcaaaacagcgcattgagcaccggttccgggagcataaagctgtcgaggttgcgggaagcgacgccgctgacggcggtgtgccagccggtatcgaggtagtccgggccgactttgcagggctgaacccgcataccgcgctgcttcaacaggctgagcagaccaagcgtaacggtggttttaccacaaccgctgccggtacctgcgagaataaatgcgtgctgcctggctgccataccccgatcctgtgccgggtggtagggctgcgtgcattcccagtctttcgactgtacgcatctgagcaacccacttcccaccgaagttgttgattattaccgacaggcaggtcttctggcttagcgtcgtcctctcccatccttcccaatccgctaagcagatcagtggtcatacccgtcatacttcacgttgtatgtgcgttggctttacttgttcaccccagtcacttacctgtgtaagctcctggggattcactcgcttgccgccttcctacaacgcgaattatttagcgtatatatgggttcgtcagcatcacagcagcgggggctgcgggggattcacacccccttccctggcgcctgtcggtttagtccgtcatgattcgagcgggactgcccggctcgcatgatttccggaatatcttacggaagctggatggctcccgtcgtgtttaatttttaattaccaaggccgtttcattacgccgatggcgcgctgaaagccatttcagatatcactctatcccatcaaataaataaaaactggtgcagcttatcgttctctcattattattttgttgcgctatgacaatttattgctctgaatgagatattttcattttagaatgagccagatacaagggcatatcaaaaatcggcaataacaaaatattgtcatttaaaatgactcagtttgtgatctggcgttaatttgctggcgataggcctgcggagtgacctgataagcctggcgaaaaactttgcaaaaatagctggtttgcgaaaatcctaaattccgcgcaatgctggcgatgctccagtcgctgtggcaaagcagctctttggcgctcaccatccgctgatggttcacccacgcgttaaaaccgataccctgatattttttaaatagcttactgaagtaataggggctgagataaacgtgggcggcgacgtcttccaggcgaagctcatcggataaatgggcgtcaatgtagcgcagcgctttcttcattttgctgtcgtgagggctggcgacccggctggcgcgcgcgggttccggctgctggggattatctttaatcaccacaaagttgagctgctttttcaggcagttctcgacgatcagcttcagtaaatccgcggaggcaatcactctggagtagtccatctccggcacgtcgcggaacgcgttgagcagctcggggtccgcctgccagccgtcgtccacgttgaggatatccaccagttctacatcgttgcttaagcgcacctgcccgcatagcacgaagcccacaaggtgcccggcgataaccagaggaatggaaaaatcggttaacccggcgtggcagcggtagatacagagctgatcggtttttgacgcctcgaggccgccgcagcggtcgctcatccggcagcgggtgctgtgctgagggtgctggcgcatcagctggcagaaaggggtgaagttaaacagttcagatatttcatcaccgtgaatattgacaaccacaaccgccagactggtggcctgcgcaaaatcctgtgcgattttattaatgagttctgagttcagtgtgctcgcagaaatcatgataaaacctctcagttaattttttgttataaataaaacatttctttaatatttacttcctttcatcatcaattgccgccaacgataaaagaataatacgatagcaaaagtctcccatccgtgggagacgtttttggccagttcgtgataccggttcatgaaaatttttcgctatttcagcggatgcattaatcctctaatttacaggtattacacggtaagttatttcctatcagataacgatagatggccgcgccgaggcaggcaccgatcagcggcgcaataatcggcacaataaagtacggaatatcccttccgccggtcatcgcgatatcgccccagcccgccatccacgtaaacagcttcggcccaaaatcacgcgccggattcatcgcaaagccggtcagcggcccggttgacgcgccaatcaccgccaccagcaggccgatcagcagcggggccagcggccctttcggcacgccgttgccgtcgtcggtcagcgccataatcatccccatcagcatggaggtgatcaccacttcgaccagcgccgcgtgccagatgctcagcgaggccgccgggtaggtgctgaaaatactcgccagctgcaggctctcaacgctgccgcgagcgatatggtgggcggattcaaactcggtaaacatagtgctgtacagcacataggccagcaccgcgccgccgaaggcgcccgcgacctgggagacaatataggggaagactttgcgcccgggaaaacaggcaaatagccataacgcaacggtcaccgccgggttgagatggccgccggatattcccgacgtcagatagacggcaagcgagatccccagaccccagataatgcatatctcccacagtccgaggctggctcccgccacctttaacgcgctcaggcagccgatgccgaaaaacaaaaacagcccggtgcccagaaactcggcggtacattgcgcttttaacgaatcattcatggtgacaccttcttagcagagttcgtgtcctgaccagccaacctcctgctggcagtagagtacaacgggcccactatatgaactccgctccgcaaattgttggcaacctgctgacggcggccccggaaaattcgggcatcaataacaaattattgtcattgaataactcaaaatagcattgctcacgcgcggatttcgcaattacgccatcgccatgacatgcaaaaatattgctaaaaccaactcatcgttttccaacaaacatcacaaatcagtttttctcgcatagcagataaaattaaattcgtcatgaacaaatttgtaaatatggaatatacaaaacaagataatcacataacaataaataaaaacaacaattaaaatcaataaattaaatttacgtttagcaattttatattattcaatacccactattttttcaccatcaaattcaagtcagccattctttttcctcgcatcttcttatagtcccaactatcggaacactccatgcgaggtctttatgcaacaagaagcactaggaatggttgaaaccaaaggcttaaccgcagccatagaggccgctgatgcaatggttaagtcagccaatgtgatgttagtgggctatgaaaagattggctccggactggtgaccgtcatcgtacgcggcgacgttggcgcggtaaaagcggccaccgatgcgggggccgccgccgcacgtaatgtgggtgaagtgaaagccgtacacgtcatcccacgcccccacaccgatgtagaaaaaatcttaccgaagggaattagccaatgagcagcaatgagctggtggaacagatcatggctcaggtgattgcccgcgtggcaacgccggaacagcaggccatccctactgaaaaccatccaatacgagagacggctatggcagaaaaaagctgcagtttaacggaatttgtcgggaccgccattggcgacaccctgggtctggttatcgccaacgtcgataccgccctgctggacgcgatgaagcttgaaaagcgctatcgctccatcggcattctcggcgcccgcaccggcgcaggcccgcacattatggcggcggacgaagcggtgaaagccaccaataccgaagtggtcagcattgagctgccgcgcgataccaaaggcggagcgggccacggttcgctgattattttgggcggtaacgacgtttccgacgttaagcgcggtatcgaagtcgcgctgaaagagctcgaccgcacctttggcgatgtttacggcaacgaagccgggcatatcgagctgcagtacaccgctcgcgccagctacgcgctggaaaaagccttcggcgcgccgattggccgggcctgcggcatcatcgtcggcgcaccggcctccgtgggcgtgctgatggccgataccgccctgaagtcagccaacgtggaagtcgtggcctatagctctccggcgcacggcaccagcttcagtaacgaagccattctggtgatttccggcgactccggcgcggtccgccaggcggtcacctccgcgcgcgaaatcggcaaaaccgtccttgcgaccctcggtgctgaaccgaaaaacgatcgcccgtcctacatctgatacccacgaggctgattcatgagatcgaaaagatttgaagcactggcgaaacgccctgtgaatcaggacggcttcgttaaggagtggatcgaagaaggctttatcgcgatggaaagcccgaacgacccaaaaccgtcgattaaaatcgttaacggcgcggtgaccgagctggacgggaaaccggtaagcgattttgacctgatcgaccactttatcgcccgctacggtatcaacctgaaccgcgccgaagaagtgatggcgatggattcggtcaagctggccaacatgctgtgcgatccgaacgttaaacgcagcgaaatcgtcccgctgaccaccgcgatgacgccggcgaaaattgtcgaagtggtttcgcatatgaacgtcgtcgagatgatgatggcgatgcagaaaatgcgcgcccgccgcaccccgtcccagcaggcgcacgtcaccaacgtcaaagataacccggtacagattgccgccgacgccgccgaaggggcatggcgcggatttgacgaacaggaaaccaccgttgcggtagcgcgctatgcgccgttcaacgccatcgcgctgctggtgggctcgcaggtaggccgtccgggcgtgctgacgcagtgctcgctggaagaagccaccgagctgaagctcggcatgctgggccacacctgctacgccgaaaccatctccgtctacggcaccgagccggtctttaccgacggcgacgacacgccgtggtcgaagggcttcctcgcctcgtcctacgcctctcgcgggctgaaaatgcgctttacctccggctccggctcggaagtgcagatgggctacgccgaaggcaaatccatgctttatctggaagcgcgctgcatctacatcaccaaagccgcgggcgtacagggtctgcaaaacggttccgtaagctgcatcggcgtgccgtctgcggtgccttccggcattcgcgcggtgctggcggaaaacctgatctgttcgtcgctggatctggagtgcgcctccagcaacgaccagaccttcacccactccgatatgcgtcgtaccgcgcgcctgctgatgcagttcctgccgggcaccgactttatctcctccggttattccgcggtgccgaactacgacaacatgttcgccggctccaacgaagatgccgaagactttgacgactacaacgtcatccagcgcgacctgaaggtggacggcggtttgcgtccggttcgcgaagaggacgtcatcgccatccgtaacaaagccgcccgcgcgctgcaggccgtgtttgccggaatggggctgccgccgattaccgatgaagaagttgaagccgcgacctacgcccacggttcgaaagatatgccggagcgcaacatcgtcgaagacatcaagttcgcccaggaaatcatcaataaaaaccgcaacggtctggaagtggtgaaagcgctggcgcagggcggattcaccgacgtggcccaggacatgctcaacatccagaaagctaagctgaccggggactacctgcatacctccgcgattatcgtcggcgacgggcaggtgctgtcagccgtcaacgacgtcaacgactatgccggtccggcaacgggctatcgcctgcagggcgaacgctgggaagagattaaaaacatccctggcgctcttgatcccaacgagattgattaaggggtgagaaatggaaattaatgaaaaattgctgcgccagataattgaagacgtgctcagcgagatgaagggcagcgataaaccggtctcgtttaatgcgccggcggcctccgcggcgccccaggccacgccgcccgccggcgacggcttcctgacggaagtgggcgaagcgcgtcagggaacccagcaggacgaagtgattatcgccgtcggcccggctttcggcctggcgcagaccgtcaatatcgtcggcatcccgcataagagcattttgcgcgaagtcattgccggtattgaagaagaaggcattaaggcgcgcgtgattcgctgctttaaatcctccgacgtggccttcgtcgccgttgaaggtaatcgcctgagcggctccggcatctctatcggcatccagtcgaaaggcaccacggtgatccaccagcaggggctgccgccgctctctaacctggagctgttcccgcaggcgccgctgctgaccctggaaacctatcgccagatcggcaaaaacgccgcccgctatgcgaaacgcgaatcgccgcagccggtcccgacgctgaatgaccagatggcgcggccgaagtaccaggcgaaatcggccattttgcacattaaagagaccaagtacgtggtgacgggcaaaaacccgcaggaactgcgcgtggcgctttgataaaggataactccatgaataccgacgcaattgaatcgatggtacgcgacgtattgagccgcatgaacagcctgcagggcgaggcgcctgcggcggctccggcggctggcggcgcgtcccgtagcgccagggtcagcgactacccgctggcgaacaagcacccggaatgggtgaaaaccgccaccaataaaacgctggacgactttacgctggaaaacgtgctgagcaataaagtcaccgcccaggatatgcgtattaccccggaaaccctgcgcttacaggcttctattgccaaagacgcgggccgcgaccggctggcgatgaacttcgagcgcgccgccgagctgaccgcggtaccggacgatcgcattcttgaaatctacaacgccctccgcccctatcgctcgacgaaagaggagctgctggcgatcgccgacgatctcgaaagccgctatcaggcgaagatttgcgccgctttcgttcgcgaagcggccacgctgtacgtcgagcgtaaaaaactcaaaggcgacgattaacttctctaagtaattcgagatgcattgaggcggcaagtgagtgacaaattcgtctggaacgaatttgaacagccataggctggctttagtgagggacagggatgtccctcataaccccgatgagcttactgtagtaagtgattcgggtgaaagaacgcagccaacaaaaaggcagtttgaagtacgacgagaaaaggggcatgtgatgcgatatatagctggcattgatatcggcaactcatcgacggaagtcgccctggcgaccctggatgaggctggcgcgctgacgatcacccacagcgcgctggcggaaaccaccggaatcaaaggcacgttgcgtaacgtgttcgggattcaggaggcgctcgccctcgtcgccagaggcgccgggatcgccgtcagcgatatttcgctcatccgcatcaacgaagcgacgccggtgattggcgatgtggcgatggaaaccattaccgaaaccatcatcaccgaatcgaccatgatcggccataacccgaaaacgcccggcggcgcggggcttggcacaggcatcaccattacgccgcaggagctgctaacccgcccggcggacgcgccctatatcctggtggtgtcgtcggcgttcgattttgccgatatcgccagcgtgattaacgcttccctgcgcgccgggtatcagattaccggcgtcattttacagcgcgacgatggcgtgctggtcagcaaccggctggaaaaaccgctgccgatcgttgacgaagtgctgtacatcgaccgcattccgctggggatgctggcggcgattgaggtcgccgttccggggaaggtcatcgaaaccctctctaacccttacggcatcgccaccgtctttaacctcagccccgaggagacgaagaacatcgtcccgatggcccgggcgctgattggcaaccgttccgccgtggtggtcaaaacgccatccggcgacgtcaaagcgcgcgcgatacccgccggtaatcttgagctgctggcccagggccgtagcgtgcgcgtggatgtggccgccggcgccgaagccatcatgaaagcggtcgacggctgcggcaggctcgataacgtcaccggcgaatccggcaccaatatcggcggcatgctggaacacgtgcgccagaccatggccgagctgaccaacaagccgagcagcgaaatatttattcaggacctgctggccgttgatacctcggtaccggtgagcgttaccggcggtctggccggggagttctcgctggagcaggccgtgggcatcgcctcgatggtgaaatcggatcgcctgcagatggcaatgatcgcccgcgaaatcgagcagaagctcaatatcgacgtgcagatcggcggcgcagaggccgaagccgccatcctgggggcgctgaccacgccgggcaccacccgaccgctggcgatcctcgacctcggcgcgggctccaccgatgcctccatcatcaaccccaaaggcgacatcatcgccacccatctcgccggcgcaggcgacatggtgacgatgattattgcccgcgagctggggctggaagaccgctatctggcggaagagatcaagaagtacccgctggctaaggtggaaagcctgttccatttacgccacgaggacggcagcgtgcagttcttctccacgccgctgccgcccgccgtgttcgcccgcgtctgcgtggtgaaagcggacgaactggtgccgctgcccggcgatttagcgctggaaaaagtgcgcgccattcgccgcagcgccaaagagcgggtctttgtcaccaacgccctgcgcgcgctgcgtcaggtcagccccaccggcaacattcgcgatattccgttcgtggtgctggtcggcggttcgtcgctggatttcgaagtcccgcagctggtcaccgatgcgctggcgcactaccgcctggttgccggacggggaaatattcgcggcagcgagggcccccgaaacgcggtggccaccggcctgattctctcctggcataaggagtttgcgcatgaacggtaatcacagcgccccggccatcgcgatcgccgtcatcgacggctgcgacggcctgtggcgcgaagtgctgctgggtatcgaagaggaaggtatccctttccggctccagcatcacccggccggagaggtcgtggacagcgcctggcaggcggcgcgcagctcgccgctgctggtgggcatcgcctgcgaccgccatatgctggtcgtgcactacaagaatttacccgcatcggcgccgctttttacgctgatgcatcatcaggacagtcaggcccatcgcaacaccggtaataacgcggcacggctggtcaaggggatccctttccgggatctgaatagcgaagcaacaggagaacagcaggatgaataacgcactgggactggttgaaacaaaagggttagtgggcgccattgaggccgccgatgcgatggtgaaatccgccaacgtgcagctggtcggctacgaaaaaattggctcgggcctcgtcaccgtgatggtgcgcggcgacgtcggcgcggtcaaagcggcggtagacgcgggcagcgcggcggcgagcgcggtgggcgaagtgaaatcctgccacgtgatcccgcgtccgcacagcgacgttgaggccattttaccgaaatcagcctgattgatggcgaataaggagcaccgcgtgaagcaatcactgggattacttgaagtttgtggtctggcactggctatcagctgcgccgatatcatggcgaaatccgcttctatcacgctggtcgccctcgaaaagaccaatggttcaggctggacggtgattaaaattaccggtgatgtggcctccgtgcaggcggccatcaccaccggcgcacagtttgccgggcagcgaaacggcctggtggcccacaaagtcatcgccaggcccggagaagggatcctgcgcgcggaggctcccccgccctccgtcatgcaacctgaacctgaagcgtcagggacggctgatgtcgtttcgccagcgccagcagaagagcttccccagcaacacggcgtggtcagctgcaacctgtgcctcgatccaaaatgtccacgccagaagggtgagccgcgctcgctttgcattcatcccggcaagcgaggtgaagcgtaatggataaacagcttctggaatcaacggtcagcaaagttctcgacgagatgcggctacgccccatcccgctgggggtttcaaatcgtcatatccacctgtcggcggcggattacgaacgcctgttccccggccatcccatcagcgagaaaaaggcgctactgcagccgggacagtacgccgcggagcaaaccgtcaccctggtggggccgaaggggcagcttaaaaatgtgcgcctgctcggtccgctgcgctcggtaagccaggtggaaatctcgcgtaccgatgcccgaaccctgggggttgcggcaccgctgaggatgtccggcgatctgaaagggacaccgggcatccgcctggtcagcccttttggcgagctggagctggcgtcaggggttatcgtcgcgcagcggcatattcatatgtcgccgctcgatgcgctgatcctgcgggtcgcccacggcgacagagtttcggtggccattgaaggcgacgcgcgcgggctgatcttcaacaacgtggcggttcgcgtttcgccggatatgcgcctcgaaatgcacatcgataccgatgaagccaacgccgccggcgccgataacccgcaggtctttgcccggctggtaggcccgcgatgaacggcgaagttctgcagcgcatcgtgggggagattgtctcccggctgcagcgtcgcgcccatagcacggcgacgctgagcgtggcgcaattgcgcgatgccgactgccggagcctgttctgccagcacgcgtcgctgcgcattctgctcgttgacctgcccctgctgggccagctgacggaggcggaaaccgacgatcccgcggcccgcaacattcacgacgcgctggcttttggcctccgcgtacagctcaccctgcaccgccagctgctgccggttatcccggttaaaaaactggcccgcctgccggtgaacttcaccgacgagcgcggagtgccgctgatcctgcacgcgggttcggtgctgagctatcgcgacgtcgcgccgctgggccaggggcgcctggttatccaccgcaaatgcctcgtgaccgcgctggcgcgcgacgcggcgcaggcgcggaatattgaactcattaagcaggagtaaatcatgcatctggcacgagtcacgggcgcggttgtctccacgcaaaaatcgccttccctggtcggcaaaaagctgctgctggtgcggcgggtcagcgccgatggcgagctccccgcctcgccgacctccggcgatgaagtcgccgtggattccgtcggcgcgggggttggcgagctggtgctgctcagcggcggctccagcgccaggcacgttttttccgggccaaacgaggccatcgacctcgccgttgtcggcattgtcgatacgctttcacgttaaggagcgactatggcgatttatacccgaacgggcgacgctggcaccacctcactctttaccggccagcgggtgagcaaaacccacccgcgggttgaagcctacggcacgctggatgagctgaacgccgcgctgagcctgtgcgcctgcgccgccgcggataaacaccaccgcgccctgctcgaagctatccagcagcaaattttctggtttagcgcagaactggccagcgacagcgaacggccgtcgccgaaacagcgctacatcagcagcgaagatatttccgctctggaagccgctatcgatcgggccatggcccgcgtcgaaccgctgcacagctttattttacccggccgctgcgaagccgcgagccgcctgcattttgcccgcacgctggcccgccgggccgaacgccggctggttgagctggcggcggaagtcaacgtgcgccaggtgctgatgcgctacatcaatcgcttatcagactgcctgtacgccctggcgcgcgcggaagatagcgatgcgcaccagaacaacatcatccgcgaagtgagccggcgctatctggccgccagccagccgagccgcagcaaggagacgacgcccgtggccctctcattccacgatctgcaccagctcacccgcgccgccgttgagcgcgcgcagcagctaaaggtgccggtggtgatcagcatcgttgacgcgcacggcaccgaaaccgtgacctggcggatgccggacgctctgctggtcagcagcgagctggcgccgaaaaaggcctggaccgcggtggcgatgaaaacggcgacccatgagctgagcgacgccgttcagccgggcgccgcgctttatggcctcgaaacgcatttacagggaaaagtggtcacctttggcggcggttacgccctgtggcgcgacggcttattaatcgggggtcttggcatcagcggcggcagcgttgagcaggacatggacatagcactggccgccatcgcggccattaacgtgggaactcatcaatgaatacttccgaactcgaaacccttattcgcaccattcttagcgaacagttaaccccggggcaaacgccggtccagccgcagggcaaagggatttttcagtccgtcagcgaggctatcgacgccgcgcaccaggcgttcttacgttatcagcagtgcccgctgaaaacccgcagcgccatcatcagcgcaatccgtcaggagctgacgccgcacctggccgcgctggcggaagagagcgccaatgaaacggggatgggcaacaaagaagataaactcttgaaaaacaaggccgcgctggacaacacgccgggcgtggaagatctcaccaccaccgcgctgaccggcgacggcggcatggtgctgtttgagtattcgccgtttggcgttatcgggtcggtcgcgccgagcaccaacccgacggaaaccatcatcaacaacagcatcagcatgctggctgcgggcaacagcgtctatttcagcccgcatccgggagcaaaaaaggtctctctgaagctgattagcatgattgaagagattgccttccgctgctgcggcatccgcaatctggtggtcaccgtggcggaaccgacgtttgaagccacccagcagatgatggcccatccgcgcattgcggtcctcgctatcaccggcggccccggcattgtggcgatgggcatgaagagcggtaaaaaagtgatcggcgccggcgcgggcaacccgccctgcatcgtcgatgaaacggcggatctggtcaaagcggcggaagatatcatcaacggcgcctcgttcgattacaacctgccctgcattgccgagaagagcctgattgtggtggagagcgtcgccgaacgtctggtgcagcaaatgcaaaccttcggcgcgctgctgctgagccctgccgacaccgacaaactccgcgccgcctgcctgccagagggccaggcgaataagaaactggtcggcaaaagcccatcggccatgctggaagcggccgggatcgccgttccggcgaaagcgccgcgtctgctgatagcgctggttaacgccgacgatccgtgggtcaccagcgagcagctgatgccgatgctgccggtggtgaaagtcagcgatttcgatagcgcgctggcgctggcgctgaaggttgaagaggggctgcatcataccgccattatgcactcgcaaaatgtctcgcgcctgaacctcgcggcccgcactctgcaaacctcgatattcgttaagaacggcccctcttatgccgggattggcgtcggcggcgaaggctttaccacctttactatcgccacgccgaccggtgaaggcacaacctcggcgcgcacctttgcccgctcccgtcgctgcgtgctgaccaacggcttttccattcgctaaccgaggtcgcgatgaagactttctcactacaaacgcggttgtacagcggtcagggtagcctggctgtgctcaggcgctttacccacaagcatatctggatcatctgcgatggctttcttgcgcgctcgccgctgctggaaaccctgcgtcaggcgttgcccgcagataaccgcatcagcgtctttagcgagataaccccggaccccactatccataccgtggtgcagggcattgcgcaaatgcaggccctgcagccgcaggtggtcatcggcttcggcggcggctcggcgatggacgcggcgaaagccatcgtctggtttagccagcagagcggcatcaatatcgaaacctgcgtggcgataccaaccaccagcggtaccggttcggaagtgaccagcgcctgcgtgattagcgacccggataaaggcatcaagtatccactgttcgacaatgcgctctatcccgatatggcgatccttgacccggatctggtggtcagcgtgccgccgcagattacggccaacaccggcatggacgtgctgacccacgcgctggaagcgtgggtctctccgcacgccagcgactttaccgacgcgctggcggaaaaagccgccaggctggtgtttcagtatctgcccacggcggtggaaaaaggcgactgcgtggcgacgcgcgggaaaatgcacaatgcctcaacgcttgccgggatggcgttcagccaggcggggctggggcttaatcacgccatcgcccaccagcttggcgggcagtttcatctgccgcacgggctggccaacgcgctgctgttaaccgcggttatccgctttaacgccggtcatccgcgcgccgcaaaacgctacgcccggctggccaaagcctgcggcttttgtccggcagacgccagcgatagtacggcgatcaatgcgctgatccagcaaatcgaacggctcaagcagcgctgcgcgctgccgtcactggcggtcgcgctgaaagagggacgatcccagtactcagcgcgtatttcggcaatggtgcaggccgcgctggctgacgtgacgctacgcaccaatcctcgcccggccagcgccggggagattcaggaactgctggaggatctgctatgagtaccgccgtcaacgctgctgaaatggcctggagcgccgaggagatccgcgagcgcgtgcgcgcggcgggcgtggtcggcgcggggggcgcggggtttcccgcccacgtgaagctgcaggcgcaggtagagatttttctggtgaacgccgccgagtgcgaaccgatgctcaaggtcgaccagcagctgatgtggcagcaggctgcgcgtcttgtccgcggcgtgcagtacgcgatgacggcaaccggcgcgcgcgaaggggtgattgccctgaaagagaagtaccgccgggctatcgatgcgctcaccccgctgctgcctgccgatattcgcctgcatattctgccggatgtctatcccgcaggcgatgaggtgctgactatctggctggctaccggtcgccgggtcgcgcccgccgcgctgccggccagcgtcggggtcgtggtgaataacgtgcaaacggtgctcaatattgcccgcgcggttgagcagcagtttccggtgacccgccgtacgctgaccgttaacggcgcggtcgcccggccgctgaccgtcaccgtccccatcggcatgtcgctgcgcgaagtgctggcgctggcgggcggcgcgacggtcgacgaccccggttttattaacggtggcccgatgatgggcggcctgattacctctctcgatagcccggtgaccaaaaccaccggcggcctgctggtgctgccgaaaagccatccgcttatccagcggaggatgcaggatgagcgcacggtgctttccgtggcccgtaccgtctgcgagcagtgccgactgtgtaccgatctctgcccacggcatctgattggccacgaactctccccgcacctgctggtgcgggcggtgaactttcatcaggccgccacgccccagctgctgctgagcgccctcacctgctcggagtgcaacgtctgcgaaagcgtggcctgcccggtggggatctcgccgatgcgcatcaaccgcatgctgaaacgcgagctgcgggcgcaaaaccagcgctatgaagggccgctctatccggccgacgaaatggcgaaatatcgcctcgtgccggtgaagcggctgatcgccaaactggggctgagcccctggtatcaggaggcgccgctggtggaggacgaaccggcagtagaaaccgtgacgttgccgctgcgccagcatatcggcgccagcgcggtagcgaacgttgcggtgggagagcgcgttacgcgcgggcaatgcgttgccgatatcccggcaggcgcattaggcgcgccgattcacgccagcatcgacggcgtggttgcggccatcagcgaacaggccatcacggtggtaagaggttaaccatgtctcaggctataggaattttagaactcaccagcattgccaaaggaatggaactcggcgatgcgatgctgaaaagcgccaacgtcaatctgctggtcagcaagactatctgcccgggtaagtttttattgatgctcggcggggatatcggcgctatccagcaggctattgaaaccggtgcctcgcaggccggcgaaatgctcgtcgacagcctggtgctggcgaatattcaccccagcgtccttccggccatcagcggcctgaacagcgtggacaagcgccaggcggtcggcatcgttgaaacctggagcgttgcggcctgcatcagcgccgccgatcgggcggtaaaaggctcaaacgtcacgctggtgcgggtgcatatggccttcggcatcggcggtaaatgctacatggtggtggcgggcgacgtttccgacgtcaacaacgcggtcacggtagccagcgaaagcgcgggcgaaaaagggctgctggtttaccgttcggtgatcccgcgcccgcatgaagccatgtggcgacagatggtggagggataatggaaagacagccgaccacggatcgcatgattcaggaatacgttcccgggaaacaggtgaccctcgcgcacctgatagccaaccccgggaaagatctctttaagaagcttggcctgcaggatgcggtttccgccatcggcatcctcaccattacgcccagcgaggcgtcgattatcgcctgcgatatcgccaccaaatccggcgcggtggagatcggttttcttgaccgctttaccggcgccgtggtgctgaccggcgacgtttccgccgtcgagtacgccctcaagcaggtgacgcgcaccctgggcgagatgatgcagtttactacctgctcaataacccggacgtagcgcgatgaaacgtctgatgtttatcggccccagccagtgcggcaaaacctcgctgacccagggcctgcgcggcgaagcgctccattacaagaaaacccaggcgattgaatggtcgccgatggccatcgacacgccgggcgaatatctggagaaccgctgcctttatagcgctctgctgaccagcgcctgcgaggccgacgttatcgctctggtgctgaacgccgacgcccagtggtcgccgttttctccgggttttaccgccccgatgaaccgcccgacgattggcctgatcaccaaagccgacctggccgacccgcagcggttatcgctcatcgaggagtggctcaggcaggctggggcgcagcagatttttgtcaccagcgcgctgaataatctgggtcttgatgccgtgctggattttctgaattcgaaggaacctctatgtcttacaaaataatggccattaatgccggcagctcatcgttaaaattccagctgctggagatgcctcagggcgatatgctctgccagggattgattgaacgtatcggcatggcaaacgcccaggtgaccctcaaaacgccggcgcaaaaatggcaggagacggcgccgattgccgatcaccgcgaagcggtcaccctgctgctggaaaagctcctcgaccaccggattatccagagtttgcaggatattgacggcgtcggccaccgcgtggcgcacggcggagagcgctttaaagattcgacgccggtcaccgatgataccttagcggaaatcgagcgcctggcggagctggccccgctgcacaacccggtcaacgcgctgggcattaacgttttccgccagctgctgcccgaaacgccgtcggtggcggtatttgataccgcttttcaccagacgctggacgagcgcgcctttatctatccgctgccgtggcgctactacagcgagctgggcattcgccgctacggcttccacggcaccagccataagtacgtcagtacgacgctggcggaaaagctgggcgtgccgctgagcgccctgcgcgtggtgagctgccatctcggcaacggcagcagcgtatgcgcaatcaaaggcgggcgctcggttaacacctcaatgggctttacgccgcagtccggcgtgatgatgggcacccgcagcggcgatatcgatccgtcgattctaccgtggctggcgctgcataaggggcaaacgccggagcagcttaatcagctgctgaataacgaatccggcctgctgggcgtttccggcgtgtcgcacgattatcgcgatgtcgagcaggcggcggacagcggcaatcgtcgggcggctctggcgctctcgctgtttgccgagcgcatccgcgccaccatcggcagctatattatgcagatgggcggcctggacgcgctgatctttaccggcggcatcggcgaaaactccgcccgcgccaggagcgccatctgccataacctgaatttcctcgggctgtcggtcgatgaagagaaaaaccagcacaatgccacctttatccaggccgagaatgcgatggttaaagtggcggtcatcaataccaatgaagagctgatgattgcccgcgatgtgatgcgcctggcgcttcccgaagcgcagacgttaaccgtttcagcctgagctcgccgcccggcaagttgcggtgaatcatggtaatagccggatcggcatgacactatgcgcttaaaattctgaaactttaccctaaataattcaagttacaggacaaagcacttgtgctttgtcccgtagcttgaagtataacgggtaaaaaggtgaatacgtggccgtagcgcaatgccccgcctcctgcggggaactcatccagggctggatcctcggcagcgagaagctggtctcctgccccgttgactggtacagcaccgtcgaggtggactacggttcgcctcgggcggatgaacgtccgctggcgcgggcgatggtcgaccggctgctgagctactggcgctatccggcggagctcggcaaagagattcggatcgatatttgctccacgattccggtcgccaaggggatggccagcagcaccgcggacattgctgcgacggcggtggccaccgcgcatcatctcggccatccgctggacgagcccaccctcgcccgactctgcgtctccctggagcccaccgacagcaccctgttccgccaactgaccctgttcgaccacaacaccgccgccacgcagattgcctgcggcagccagccgcagctcgatctgctggtgctggaaagccccgccacgctgctgaccaccgattaccaccgccttccccggcttgagcagctgcacgcccattccgccgccctgcagcaggcctgggagaaagttcagctggcctgcgagacggataatccgcggcggatgggagaggccgcgacgctcagcgccatcgccagccagcatctgctgccgaagccggggtttgatacgctacgggggctggtggaagagtgcgatttatacggtattaacgtggcgcacagcggcagcgtggtcggcctgatgctcgaccgtcagcgtcacgatattgagtatttgcagcgacggctgggagagacgcggcttagcgagctctggccccggcagcacctgctgcgcatggtgcagggcggcgtcgaactgcgctaacgcttccgcagccatgccccgggttgcggcgctgcgcgccttacccgggctaccggcccgcagacggctgtaaacccgtagcccggataagcgcagcgcgagccggggagaagaccgcaacaaaacctcatgctgtgcatcttccccggaggcggcgctgcgcgccttacccgggctaccggcccgcagacggctgtaaccccgtagcccggctaagcgcagcgcgagccggaaagaagccgcaccgatgtattcatcccggcgcattccccgggttgcggcgctgcgcaccttacccgggctaccgacccgcagacggctatgaacccgtagcccggctaagcgcagcgcgagccggggagaagccgcaccgatgcattcatcccggcgcattccccgggttgcggcgctgcgcaccttacccgggctaccgacccgcagacggctatgaacccgtagcccggctaagcgcagcgcgagccggggagaagaccgcaacaaaacctcatgctgtgcaccttccccggaggcggcgctgcgcgcctgtccgggctaccggaccgcagacggctgtaaccccgtagcccggctaagcgtagcgcgagccgggaagaagaccgcaacaaaacctcatgctgtgcaccttccccggaggcggcgctgcgcgcctgtccgggctaccggcccgcagacggctatgaacccgtagcccggctaagcgcagcgcgagccggggagaagaccgcaacaaaacctcatgctgtgcaccttccccggaggcggcgctgcgcgcctgtccgggctaccggcccgcagacggctatgaacccgtagcccggctaagcgtagcgcgagccgggaagaagaccgcaacaaaacctcatgctgtgcaccttccccggaggcgggctaccggcccgcagacggctgtaaacccgtagcccggtcagcgcagcgccaccgggagaaccgcagaagaacaatggcggcagacatctactcgttaaatatccgcctgaaggccgccagcagccgggtattttcctgctggctgcggatcgcgacgcggaagtagcgcccgtcgagccccgggtagttggcgcagctgcggatcaggatgtgctgttgcagcatcccgtattgcagatccagatccgccacgtcgcagcgcagaaacagatagtttgcccgcccgggatagaccgtcaggccgggaatatggcgcagctgatggtaaaagcgctgcccctcctccgccagccactgccaggtttgctgctggtaggcgctatcctggagaatgatctcccccgccagggcggcaaacgcgtttatcgaccacggcatctggcgctcgcgcattctcgccaccgcccgcgcatcgccattgaccagataccccagacgcaggccgggaatggcataaaacttggtcagcgaacgcagcacccacacgtgcgggttgtggcccagcagcggaataaatcccggctcgtcggggataaaatcgataaacgcttcatcgagaatcagggcaatgcccagcgaccgacagcgttcagcaatcatctccagcagacggcgctcgggcagcaggccggtaggattgttcggcgtgcagagaaataagcagtccagatccggcgtcagggcgtcaagaatcgccccggtgagctgccagccatccgcctcgcgcagcagaaattcccgcaccgcgcagtccaccgactgcagcgcccggcggtattcggcaaagcccggggtgacgatcatcgcctggcgcggcttcagcccctgaaccagcgtaaagatcgcttcggtttcgccgtttccggcgaggatccacgaggcggggatctgatggtgttccgccagcgcaaggtgcagctgctgatactcaacgtcagggtagcgttcggcgcaggccatattgtcgaggatggcgcgctttaaactttccggcatccccagcggattaatattggcgctaaaatccagcagctgcgccgcagagatgcccataagcgcggcggcctcgcggatattaccgccgtgcgcgctctttaatagagccatttcactttcctgttgcgttaccctcgccttgccagcgtcgcgccgtcggcgaagtaggctttaatccctgccagaatcgactctgcaacttcctgctggaatttcgccgttttcaatttacgctcttcttcgacgttactgataaacgcggtttccaccagaatcgatggaatatccggcgccttcagcaccgcgaagcccgcctgctcaacccggttcttgtgcaggttattaatgttgcccatcttttccagcaccgccttgccgaacttcaggctgtcggcgatcgtcagcgactgcaccatgtcgaacatcgtgtggtcgacgtagcgatcgccgcttttgctgacgccgccgatcaggtccgaggcgttctgggtctgcgccagatatttagccgcggtactggtggcccctttggttgacagggcaaacaccgacgatccgctgggctggcggctggtaaacgcgtcggcgtgaatagagacaaacaggtcggcgcgctgcttctgcgctttggcgacgcggaccttcagcgggataaagacatcctcgttgcgggtcatatagaccttcatattgccctctttctcgatcagcgcgcgcagccgccgggcaatctgcagcaccacgtctttctcgcgggtgcggtattttcccaccgcgccggagtcttcgccgccgtggccgggatcgagcatgataacgataggccgatcgcgcccggctttacccggtttaggcccgctctccgcaggcggaacctgccgctgcagatcgcctttgttgtaatcttcgagcagcgccagcagcggatcctgcacgtcggtggcgttagcgggatagaggtccatgaccagtcgctctttaaacccggcgaccggagccagcgcaaacagctgcggtttcacgttctgtttcagctcaaacaccatgcgcacggtttgcggatcgaactgccccacgcgagcggattgaatatagggatcgtcaccgcgaatctgactccccatacctttcagtacggagttgagattaaccccttccagatccaccaccacacgttcaggattgctgagcgcaaactgccgatatttcaggatatggttggactccacggtgacgcgcgtgtaggtcgatgatggccagacgcgtacggcaaccacctgcgccgcggctgccaacccaaccggactcacactcattaaccacatggcgcccgccccctgtaaaaatcggcggcggcttaatcctgacttgtatcccgacatgccactcccaagcagtaagaaatcattcgtatttaaaacaaacagattgaccggaaactttaacgaaaggcgcataacctgtcatctataaaagggtaaacaatctttgacaccctgatttggctcacactgttttcccggctcagccaaaaattggggcttgcgtttgccggcgaaacagaataaaaatacagtaattacgaataatcatgcattgaggttgtgtcatggtgaaggaacgtcgcaccgaactggtagagggattccgccattctgtcccctatattaatgcccatcggggtaaaacgtttgtcatcatgctgggcggggaagccatcgagcatgataatttctctagtatagtcaatgacattggcctgcttcacagcctggggattcgtctggtggtggtctatggcgcccgcccgcagatcgatgccaacctggcggagcatcgtcacgagccggtttatcataaacaaacccgagtgactgacgccaaaacgctcgagctggttaagcaggcggcgggcatgctgcagctggaaattaccgctcgcctgtcgatgagcctcaacaacacgccgctgcagggcgcccatatcaacgtggtcagcggcaacttcattatcgcgcagccgttaggcgtggatgacggcgtagactactgccacagcgggcgcatccggcgcatcgatgaagaagccattcaccgccagctggataacggcgcgattgtgctgatgggcccggttgcggtgtcggtcaccggcgaaagttttaacctgacctccgaagagattgcgacccagctggcgattaagctgaaagccgaaaagatgatcggcttctgctcatcgcagggggttcacaatcaggatggcgagatcgtccctgagctgttccccaacgaagcccaggcgcgggtggaagagatggaagcggacgaagactacagctccggcaccgtgcgctttctgcgcggcgcggtaaaagcctgccgcagcggcgtgcgccgctgccacctgatcagctatcaggaaaacggtaccctgctgcaggagctgttctcacgcgacggtatcggtacccagatagtgatggagagcgccgagcagatccgccgcgccaccattaacgatatcggcggcatcctcgagctgattagcccgctggagcagcagggcattctggtcaggcgttcgcgcgaacagctggagatggaaatcgataaattcaccattattcagcgcgacaacaccaccatcgcctgcgccgcgctctatcctttcccggaagagaagatcggcgaaatggcctgcgtggcggtacatccggattaccgcagctcatcgcgcggtgaagtgctgctcgaacgcattgccgcgcaggcgaagcaaatgggcctcagcaagctgtttgttcttacgacccgcagcattcactggttccaggagcgcggatttacgccggtcgacgtcgacctgctgccggagagcaaaaaagagatgtacaactatcagcgccgctccaaggtgctgatggcagacctggcctgatcccttctccccggaaagcgcgcggccgaccggggaaaacctcactgggcggaaaagatatccgtcaggccgctgcgtcgttcggtacgcgcagccaccgcctgagtcagcacctgctcatcggcatagatcgacagctgccgtttcgcacgcgtaatggcggtataaaccagctcgcgggttaccagcggcacgctgcgcgaaggcaggatcagcgccgcgtgatcgaactccgacccctgcgatttatgcaccgtcatcgcccaggcggtatcgtgctccggcagacgacttggctgtaccgacttgatgctgccgtcgggcatcgagaaccagacgcgcaggccatcgcctctttccagcgcgatgccgatatcgccgttaaacagccccagcgcgctgtcgttgcgggatatcatcaccggccgtccttcataccagcgcgaatgccgcggtaacgcgatcgcccgcttgcggttcagcatctgctccagctgttcgttcacgccgctgaccccatacggaccctcgcgcagcgcgcacagcagctggaattcgccaaaggcggcgatcatctcttcgggctcagcccgcgcgcgcagcagctgcaggaagcggccgtagcccgcctgcgcctgattcagcatcgcttcatactcttcggtggcgctcagcggatacagggcgatatcgtcgaacgactgacgcagcgttgcgcgtaccgcgctgcgctcgccgctgttcaccgcccacgccagatggccgatcccggaatggcgaccaaaacggtagcttttttgcagcaggcacaggctgtcgcgcagcgcaccggcaacgttgccctcgcccgccggcaccggctggccggtcaaccgggcgagctgtgccgcccgcgccggggtatagcctgcattaacccaggcgcaaatatcccccagcaccgctccggcctctaccgacgccagctgatcgcggtcgccaaggaaaatcacccttccgtgctcaggcagcgcgtcgatcaggcgcgacatcatcggcaggtcaatcatagaggcttcatccaccaccagcacgtcaagatgcagcgggttgccggcgtgatagcgcatccgctggctgccgggctgcgcgcccagcaggcgatggagggtgctggcttcggtgggcaccagcgccttttgttggtcgctgagagggaggcagcgcagcgcagcgccgagggactcggtcaggcgcgccgcggctttaccggtcggcgccgccaggcgaatccggcagcgcgggctggagaatgtctggatcagcgcggccagcagtttagcgacggtcgtggttttaccggtacccggaccgccggaaatcaccgaaatccgtcgggtcagggcgaccgcagccgccactttttgccagtccgtttcctcagcgggcggaaacagcgcatcgagcgtcgaagccagccgggcttcatccacctccagcacctgattggcctcattgaaaaagcgcgcgacggttaattcgttgcgccacatgcggttgaggtaaagccgttcgccgcagaggatcatcggcgtcgggcgctcaccgccgctgaccgcctcagcatcgttaagcagcggcagccagccgtccggggcgccggtcagctcaaggatctgctcactcaggcctgccgcttttgcgctcagcagctcatcctcggcgagacgcgaaatcggcaggcagacgtggccttcaccggcatcgcggctgagaatggcggcggtgagcttcaccgccggatgcgcctcctgcgccaccatgagcgcaaactggacgtccagcgggcgcagcaggcgctgttcaaccgcctgcagtaacagttcatccatggtcatagcacaacctcctgggtttccccggcaaacagcgcatcgaggccgttaatcagcggcagcgccggccgggtggtgaagataccctgcccgccgtcctgcccgtccatgccgcgtaaaaagagataaataacgccgccgaagtggcgttcgtaatcataatcggcaatgcggtggcgtaaatatcggtgcagcgccaggctatagagctggtactgcaaatcgtaacggtgcgaacgcattgcctgccgcatcgcgtcctgggtataagcctcgcgattttcccccagccagttggatttgtaatccagcaggtaatagcggccgttgtggcgaaacaccaggtcgataaagcctttcagcatcccacgcacctggcggaaatcgagcgttggggtatccacggagagcggatcgtactgacgaatcagcgcatccagacgcaggggatccagcggctgttcgatgggcagataaaacgccatctccacctgtttatcgccttcgctcagctgattaagggcaatccccgcgccgggcagaggggtacgcagcacgccgtcgagccatgcggtcagtaccggggtccacttttcctcgaagccgctcagctggagcctggccgccatccagtcggcgggaaccggctgggtaaaatcgagatcttcgaacaaactgtgcagaaacgtccccggcgacgcgccgcgcgggaactggtgcggagtaagctgcggctcttccgcaacctcaccgacgccggcggcatcgacatccagacgcggcagaagatcctgcgccgcgctgtgtccattctgctgcaggccggagtagctggtgacccgccagtcatcggtcaccgaacgcgcgagcaaacgggctgaaagcggcggtagcgccgcctgcggagcctgccacggcgttggcgcagccgtatccgggagctgcagggcgatctccccgctgcagaacgcctgcagacgggccatcagccctgcggcatccatcgcttccccgccctgcagcaggcggcccagcgcgctgtggtgaaaatcgctggcgccgggcttgtcgctgcgccgggtgctgagcggcgcaacgccaaggctgcagtgccagaccgcacgggtcagcgcgacgtaaagcaggcgcagatcttcggccaggcgttcggcctccgccagctccatgctgccctccgcctgccccaggtcgagaacggcggcaaaggaggttctgtcgtgataaaacgcctgatcctgtttacggaaacgcgcaataaacggcagccagaccagcggatactccagccctttcgatttatggatggtgacgatctgcaccaggtgcttatcgctctccaggcgcatctgctggctggaggcgttgctatccggctcggcgatatgctgcgccagccagcgcaccagcgcatgttcgctctccagctggttcgccgcctcctgtagcagctcgctgatatgcaggatatcggtcaggcgccgctcgccgccgctggtcgccagcaggttttcggcaatacgccgcgcggtcatcagcgcccgcagcatcggcatcacgccgcgctgccgccagacttgccggtagccgctaaactcttctaccagctcatcccaggcccgttcgctctggttgaggttttcaatgtcctgcgcgttgaggccgaacattgcggtcgccagcgcgctgcgcagggtattttcccgctcgggggccagcaccgcctgcagcacccacagcagctcctgcgcctcgggggtttcaaacacgctatcgcgattggagagataaacggagggaatcgacagcagctgaagggcatcgcgaattaacgacgcctcctgacgattgcgcaccagcaccgtgatgtccgaagcccgcacgggttcagctttttcaccgcgccacagcagcgccttgccctgctggcccgcgctgagccagtcgcgaatttgtgccgcgcacagctgggccataaacgcctggtaatcccccgccccgacggcctcgcccgacatcagccagatattcatcgccggtaccgcagcatcatcgacggtaaagcgcagcccctggtttttatcggccgacttcaccggcataaacgggatttcgcggaacataaaggggttatcgctgaggctaaacaggcgattgacgctatcaaccatccccggcgcggagcgccagttggtatcgagcgtatagtgggcggtgacgtccccacgcgctttcatgtaggtaaagatatccgcgccgcggaaggcgtaaatggcctgcttgggatcaccaatcagcagcagcgcggtgtctgcctggcgccgccagatgcggcgaaagattcggtactgctgggggtcggtatcctgaaattcgtcgatcatcgctaccggaaagcgctggcgaatcgcgctggccagcgcttcgccgctctccccgcgcagggcgtcatccaggcggctaagcatatcgtcaaagcccagctcgccgcggcggcgtttctcccgcgcgaccgcttcgcggatttcaaccatcgccctggcaatcaccaggtcggtcaaggttaacggtgtcgccagcagcgcttctaccgcgctgaacagcgggtgtaccggcggcgcgccgtctgctttggtgcgctcaagcaagaaggcctgggagaacttctccagcgcatccggaagctggtagctcagggtctcttcctgggcccaggcggtcactttctccagccatttcccctgattgccgcgattaaacttgcgccggtcgaggcccgagttttccagcaccgcctcaacctcgcccacctgtgccagccactgctgcttcagcgcgttgatgcgttcgataatttgctgatggcgttcggccagcgtttcgtcagccggcggcggcgatttgagctgcggcgcctctccctgtagccagcggtcgatggatttcagcagatcgcgcggccctttccacgcttcgtggataaccgccgcgatgtcacgcggcagtgggtaacagtggcgacgccagaagtcggcgcaggcctgatagcgcaggcgggattcatcttcaatcagctgctgttcgaacagcatgccggattcaaaggcgttaaggctcagcatccgctggcagaagccgtgaatggtaaataccgccgcttcgtccatctgccgttcggccagcagcagcgtttgcgccgcctgggttttatcggcgatttccgccagcagcccggcgtaaagaggattgtcggtactttcgcgcaggcaggcgatacgcagctcgtggatattgctgcgaatacgcccgcgcagctcttcggtcgccgcttcggtaaaggtcactaccagcagctcttccacgctgacctggcggggaaaggcggattccccgcccagccccagcagcagccgcagatagagggcggcaatggtaaaggtttttcctgtgcccgcagaggcttctatcaggcgctcgcccgtcaggggcaagcgcagtgggtcaagagactcggcggtgtcggtcattcattctctcgcatcaggggtaaggatttctgcaatgcgctgacgttctcccagactttgccatcctgcggatgcgcgtattccgccttgccattctggctaccggaaacctgggagagaattgccatgccctgcggatccaccaccgtctgatggaagaagtcggcaagcttttgcggcgtcagcagtttaatctgagccactactttatcacgtgaatcgaagcgcatattaccgcgatcgaaatctttgctcagcttcgacgcttcatcgcccagcgtttgcggcgcttccagcatttgaccgatcaccgcctgctgaatctgcgcaaactcttccggcttcattgcccgcagtttggcttccgccgtggggaagaaggcctggaaacgctgccagaggtaagccggctgcttatcgctgctttgcagcaggaagcccatcccccactggcggccaacgttcatcgagaaggcgaagaccgcgtagcccagctgctcttccgtacgtagctggttatagaaccacggctgtacgatttgcccgaggagcgagctggcggcagaactggcgtattcgtccacgttcggcggcgcgaagacggcggccagcgcggaatcggtactgttgcccgctttttcaaaaatcgccagctgtttacgatcgaccagaacgtctttgttacggcaccactcgttgccgtcggcgcccagctgtttttgaatctgccgcgccatggcggtggattgatcggcggtaagattaccgatgaccatcagctccggtcgccctttcgccttgagattatcgcggtattccagcacctctttcagggtgatcgatggcagcagcgcccgacgctcttcgcgctggaagtacggcacctgagaaaccatctgaatcggcatgatcgcctgatcgtaggctttgcctttatccgccgaatccatcatctgggcataccaggatttagcctgctccagctgctcttcggttggcgtatagctgaagtaaccgtcgagcagggcgttaaacagctcaggcagatgctgcgtatagccgttggcgttaaccatcaggccgttattcgcgccggtagagaagctgatccccccgaccgccgcctggttgctgagctggtcgagcgcaatgcccgccagataatcattgagcgcaaacatcacctgccggcgggcgctgtccattgcctgcgggttacgcagaaccagcgaaatatccgctttcggttcgctggcgaagtactggctcggcgcgtaaatcacccgcagcgtcggttcatctacaatcagctgcggatgcgggtaagccttgtcgcttttgattaagctgaaatcatccggaataaaggggttcagcaccggcagcttgaggtcgatggcgctggacttctgctgccagtcggcaaaggtctgctcgctgatcttatccacctgatagggcgcattgacgaagtaggcggtcttgttatgcggctctttcgggctgatgtaccagatgcgggcgttttgcggcgtcatcatcgccaggcggtcttcgatcgcctgcggatcgtagcgatcggcaatgttgacaacgtccagcgtatgctcgaccggcacgcggatcatggtgtccgccagccattcgacgtaatccatattgcggttgatggacgggtagcggaagtcgagcgccagcacgtgggccagctcatcaaaatagcgcttatcgattccctggctgcgcagcagattgaggtagctgaagatggccgcggtaacttcatcgcggtgcgccagacctttgtccgtcagggtcgcggatatagccagcaccccgctgttgccgttcaccaccgggtcggagtccgcgcgaatcccttcaaccagcccctgcttttgcagccagtctgagagcgtgccgggactgcgattaccgatcatataggtcaccagctcgtcggttttgctgcggaacttgtcgctattgttatcaatgcggaactccacgcgcagcactttacgcggcatcgccggaacgtagtgaatgatgatgcccttttgcgcatcggtcaccaccgggacgttaatctccggtttgctgatatcgtggttcggcacgcgaccgtaggtggccgccgcgatgctcgccagctccggcagcggcttgttgctgtagatcaccgctttcatcaggttggcggaataccagctatcgcgaaaggcgtgcagggcatcaagcaccggtttaccgggcttgtcgctcagcgtttcaaggttaccgccggaaaactgcgagccggggtgcgccgggttaatggtttccgcgctaacctgcgccattcgcatcccgtcccgggtacgcgccatcgtgagctcggcgttaaccgcattacgctcgcggtcggcatattttttatccagcagcggcgcggcgatggcgtcggccaggcgatcgaccgcgccgtccagggcatcgttttccacttcaagatagaaggcggtgcggtacggcgcggtgctggcgttgtggctgccgccgtgcattttgagatactcggcgaggctgtcaggctggggatactttttcgagcccatcagcgtcatatgctccaggaagtgggccagcccctgatgctcggcgggatcctgcagcgatcccacgggaacgaccagcgccgacagcgattttaccgcctggggatcggaaaccagcagcactaccatgccgttatcgaggcggatcgcctgatattgacgggtatctttttcgcttttacggatggtttcctggatcggttgccatccggtgtctgcctgacttaacggcgcccaaagggcggccagtaaaacaataaccttgaaccataaactgcggggcattcacggacctcatcattaacaaacctggcgctgcataattggcagcctttataaacatcagtccgtgattcgttgcgcatcataaatgaactgccatccagtgcgcaatttttatactattacaatgttattcggactgatggaaacgaaacaccggtagcaaataacgctgcgtttgcgtcaggatctcttcatagtattccgcttccagcgtgcgccacaggcgctgataccagacgtcggcaccttcgccgctgaccaccatgttcccttcataagcctgaagaaatttactgcgcgctttttgctgcgtctcttcgtccattaacatgacatccttttcggcgtcataacagacttttagccatgcgccgccgctttccggcagcagcagcagcggtttggacattccctgcaggtaaccgtcaaccagatcgttgaggtagacctgggcctgctcctgcgccagcggtggaaaacgccactcgccctctttgcgcacaaacagccgactttcgccggtaccgccactagcacaatagacaagatgctccagccaaagttgcatcccctgcgccacgcttaatagcgaaggccgccagcgcagcaaaccgtcggattgtacctgctgcagccagccggtgatgttgactccgttgcattgcagatcgatttccatgctctgccccggctggcggcaggcgatcacccgttcggccagattttgcatctcctgacgctgggtctcccaggccagttcgccgaacgcgccatagggtagctccccggcggcacggaagcggcgatacattgccgaggcgtcctgctgctcaatcagcgtattgagcagctgctggttcagctgatagcggctcagcccttcgagggtaaaaggttcatcgtcggggatctcgctctcctccgagcggaaattcacccgcagccgctgctgaaagaacgcgcgaacaggatgctgccagaagcgcagcagctgttcgaacggtaagtgatcgatgtccggtaccggtagcggctggatgaacgcgccgtgcgcttccccctgctggctggcggccgccagccattcccgggcatagctttgatcttcattagccagaaaattggcggcatcgaaaggcatgcgggtatgcagatgcgtgatgtgctctttgacccgccgttcgctggcatcgcagtccagctcttcgtccccttccagacagtggctctggccgatgtagtccgccagctcctgaaccagaacggagggatagcgctcgctattgtcctgaatggaacggccgatatagctgatatagagcttctgctcggccgacatcagggcttcaaggaacagatagcggtcgtcgtcgcgacggctacggtctccgcgctgcggcttctggctcattaaatcgaagcccagcggcgccagggtgcgcggataaacgccgtcgttcatccccagcaggcagaccaccttgaaaggaattgaacgcatcggcatcagggtacaaatgttaaccgggccggcgagaaagcgctggctgatgcgctgctgatcgagcctctgggacagctcatcgcgcagcaaagagagcggtaccgtttcgccatactgcgcgtcgactccgccgtcaatcaccgcctgccactgctgttctatcagcgccagggcggcttccgtttcgctgtccggaaggaagaagtcgttcagcaggtcgcggcataccggcagccactcggctaatgggcgatcctgggccagcccgcggcgccagagattaagctgcatcagcagcgatgccaggttgcccaccagctcggcgataagcccgctcgactcatcataaggcagcaccgagcgccactccccttcgctgctgtccatggcgtagcccaacagcatacgcgtcaggccaaagcgccaggtatgctggccggtagccgggagatcgagttcacgcacgttgtcgtcatccattccccagcgtacgccggattcgttaacccactggcgcaggtagcgtagcccctcttcgttaatgttaaagcgcgcggccagcaccggcacatccagcagcgccagcacgtcttcgctggcaaagcggctgtcgggcagcgaaagcagggtgataaacgcctgcagcgccggatgcgattcgcgggcccgccggtcggatatcgcccacggcagccagcgctcgccgctggcgctgccgaagaccgcctgaatataggggctgtagctatcgatatccgccaccatgacgataatatcgcgcggcgtgagctcgggattctcttcgagcatcgccagcagccggtcgtgcagcacctcaacctcgcgctgcgggctatggcagacatgaatcgtcaggctgcggtcgtccgccgccagcagccgcttgctgcggctgttggcaaactcctcggcgctgcgcccggccaccgccgcattacgcagttcgagaatatccgcctgaagattatgcaacaggttatccggcgcgatatcgacaaaggcgtccagctcttcatagcgctcaagacccgccagcaggtagatatagtcgcgccccagcttgccccaggaggccagcagcggattgccgacatcctgttccccggcatcgttgaataaccccggagcctgttgcgtatcgcgaaacagaggcagctctcgcgtcgtttcgcggtggtggcggcgctggcgggagagcagctttgccagaaatgccggatctttaatgtcgccccagtagtagcggcacgggttagtgaagagaacatatacatcgacatgcttacccagcgcctggagcgcctgcaggtataccggcggcagcgccgaaatcccgcagataaacacccgcgacggtagcccggcgggcggctgttcggcggcctcaagcgcgctgataaagcgttggtataaattggcgcgatgccacagcggctggcccagctcagcggtatattccaccagcgctttccacagcggcgcctgccactcctgcgcgtctccaagcccgtcaacgcgctggtcggcctcccagcgcatcagccactcggggcgataaaccagatactggtcatagagatccgccactctggcggccagctgaaacagcttgcgcttgtcgctatcgtcgtgcagatagtggcgcagtagcgtaaaggcttcatcgttcagccgctgcggtagcagggtcatgagtttccagctcatactttgcttgctgaacgcgctttctccgggaatatcttttaacacccgcacgaacatgtcccagataaaactggcgggtagcgggaactcaatgttggccgcaatcccgaagcgctgcgccagcgtcatctgcagccactgcgccatcccggtactctgtaccagcaccatttccggcataaaagggtcatccagccgctggcgctcgacgataaactccatcaaggcttcaagcacatccagacggtttgagtggtacacccttaacatattcgctcctggctactgactgaccgggcagtgcagccgggtcatctgcgcccgcctggctgcgggcatcgtgatcgttaccgtgatgctgacacatctttgcaccgatgtctgcatgcgggatacctggcgattcgcgggaatcaccggtgggctaagctgactgaatcgccacgcatcgcgccacagctgacggtactggttgagctgcataaagccgttggccagcccacgctgatagcccgccagcgcggtcacggttgcgataagcaagactaaagccagcagcgtttcgggcaggctaaaccctctctgccgcctcagggcatctggcataggcttgcctcctttaacgggcaaaaatcgctccagccgtgaggcgaaaagcggacgcggttttgttcgattacgcctgactgccacagcagtatgccgccgccatcgctgccgccaatcagcaataccgaggcgtcgctaaagactcgcaggcaggcgcgccagccgagcgccgcgttctgctggcagctaaccgtttcctgaagcggccagacgagcccctttccccactgcagcgcggaatgcgcatcagcggcatcgccaagcgcccgcgtttcgctggccgtctgcgctaacagcgaacgctgctgctggtgcagcccctggagtaatagcgtgccgagcgctaacagcagcagcaccatcagcagcgaagagagcccgcgctggcgattcacaggttatatcccgttacgccgtattccgcccgcgcgcggatttgcgggtcggcgaccgagtgcgccgcaagggtaatcgataattcaggcgcgaagcccgccctctccaggcgcgtaacctgaaacgcggtgacctgaatcgccgccgggttggtcattttctcccagcctttgccactgcaggcgcttgcgccgcgcagggtttccagcgcgccatcgcgcaggcgaaacccggtggtatccgattccgatgacggcgcgctattccagacgccatcgctgttgctatcccagctcaccagcaggcaatcaccgccctctgcgatatacagcgcctgcccgtaacagcggccgcggcagtatccggcgcgctgcagatgcttcgcgacggtgtagattcgctgccagagctcattttccagcgactgctgccgggtctggcgaagcgcggcccactgcagcgccggaagaaaacgcgcgctgccgagcagcagcacggagctgatggccatcgcgatcagcgtttccggcagggaaaagccgcgctgttttacagacacgatgccgtctcctcgccgcgacacaggcggatacgcccccaatgagaaacgataatgttccagccgcccgccgcgctttgcaagcggatatgcccggcccaggcagtattacgcaggccataaaaccccagccccggcgtcatcgcgctgagcgagacctccggccatagcggttgcagcgtgaaagcgtccctgaggcgacagtcggccatcggcccgctggcgctcaggcaccagccctccgcgctttggccgacgcttaataccctgtcgcggttgtgccagttggcgtcatcgcgtagcagcaccaggtagtcgcggacctggcaggcggtttgccacaggcgctgctgccgttgccagctctgccagccgtacagcccgctggcgccgagaatgacgaccacgaccatggtgagcagggtttcaatcagggtatagccatgttctctgttcatgggccgagtatgcggaacattgaggctttattcgaacggtaaaatgcgggtttgcggcgcgcgccggagagtattaaaggcgttgcagcgggtttcaacagtgcaggaaatctgctcgcaaaaaagcgttccgtcgggggaataaagctggccgtcggcccggctgaggcataaaaaaaccggcgctcgcaggcgccggtttttcgtcgtcacttccggattaaatcgccaccggcgctttaatccccggatgcgggtcgtagccttcgatttcgaagtcttcaaaacggtagtcgaaaatcgatgccggcttacgtttgatcaccagcttcggcagcgcccgcggttcgcggctcagctgcagatgcgtctgctccatgtggttgctgtacaggtgcgtatcgccgccggtccagacaaaatctcccacttcgaggtcgcactgctgcgccaccatatgcaccagcagcgcgtagctggcaatattgaacggcaggccgaggaatacgtcgcacgagcgctgatagagctggcaggagagcttgccgtcggcgacgtagaactggaagaacgcgtggcacggggccagcgccattttgttcagctcgccgacgttccatgccgagacgataatccggcgagaatccgggtcgtttttcagctgttccatcaccgtgctgatctggtcgatatgacggccgtccggcgcgggccaggagcgccactgcttgccgtaaaccggccccagatcgccgttttcatccgcccattcgtcccagatagtgacgttgttttcgtgcagatacgccacgttggtgtcaccctgcaggaaccacagcagttcatggatgatggagcgtaaatgacagcgcttggtcgtcaccaacgggaatccttcctgcaggttaaaacgcatctggtgaccgaagatggagacggtaccggtaccggtgcggtcatttttttgcgtgccctcatcgagcactttctgcatcaaatcaagatactgtttcatggttcctcaagaattttgttgctgcggacgacaacggtacgcccagaccatcatgatgatacccgcaagcaccatcggaatcgaaagaatctgccccatgctgatgtactgtacccagccgccggtaaactgggcatcgggctgacggaagaactccacgatgatgcggaacagaccgtagccaatgaggaacaggccggaaacggaaccggccggacgcggcttgcggataaacaggttcaggatcaggaacagcacgacgccttccagcgccagctcatagagctgagaagcatgacgcggcagcgcgccgtaggtatcgaacagcgattgccactcaggatgcgacggcagcagcgccaggtcttccgcccgagagccggggaaaatcatggtgtagtggaagttcggatcgacgcggccccacagttcgccgttgataaagttgcccagacgcccggcgccgaggccaaacggaatcagcggcgcaatgaagtcggaaacctggaagaaggtacgcttcgtgcgtttggcgaaaatgatcatcaccagaatcacgccgatcaggccgccgtggaaggacataccgccgtcccagacgcggaacagatagagcggatcgtcgaggaacaccggcaggttgtagaagaagacatagccaagacgcccgccgaggaaaaccccgaggaagccggcgtacagcaggttttcaacttcgttttttgtccaaccgctgcccggacgattggcccgacgggtggccaaccacatcgcaaaaacaaacccaaccaggtacatcagaccgtaccagtggagggagaccggtccaatggaaaaaattaccggatcaaactccggaaaatgcaggtagccactattcatctgtcaccataaacacttgttattccgccgaaagtggacagcggggatcgttcgcgcgcgtcagaaacgggcgctccaaaggctgcgaatgatagcataagcgcgaagggcgatccgcgccggacatgtaaaagatatgtatacgaatgcgaattcgcggctgagcattcccggaggcggcgcgctgcgcctgtccgggctacccaaccctcaggccgcccgaacctcgtcagcgttgtcccggatcacggctaacgccttacccgggctacaaattcatgaaccgtagcccgcgctagcggccgccgcgaatcaggccgccgagtccgcgtcgctccataaaagccgcgacctgatggcgcacttcggcggtcatctgcgcttccaggctacgctgggaaagctcctgggcttcattgatatcgatgcgccgcagcaaatacttcactctcgccaccgaacgaccgttcatcgacagatgacgatagcccataccaatcaggatcgtcacgcacatcggatcgcccgccatttcgccacacaggcgcaggtcgataccaaaacgctcggcgtcgcgggcaatcatcgccagcgcccgcagtacccccggatgcaggctgtcatacatactggcgacccgggtgttgttgcgatccaccgccagaatgtactgggtcagatcgttggtgccaacggagataaaatcaacgcggttcgccagctgcggcagcataaagaccatcgacggcacttccagcatcacgccaagacgcgggcggggaatggcgtagccgatcatctcttccacttcgcggctggcgcgatcgatcaggcgacgagcctcatccacttcatccaggctggtgaccatcggtagcaggatgctgaggtttccggttgccgcgttggcccgcagcatcgcgcggacctgtaccagaaagatctccggctgatcgagcgtgatccgaataccgcgccagccaaggcacggattctcttcgctgatcggcatatacggcagctgtttatccgcgccgatgtccagcgtgcgcagcgtcaccgatttctcgttgaacatctgcagcatgccctgatactgggcaacctgctcctcttcggaagggaagccgctttgcagcataaaggggatttcggtacggtaaaggccaataccgtcgacgaaattgccgagtttttcttcatgctcggggctcaggcccgcgttgagcatgacttttacccgctcgccgcttttcagttcggaagcgcgttcaagatcgtcctcggccaggcggctaagctcgttctcttcgctgatcaggcgctgatactcttgcagcagcaccggctcgggatccaccagcagctcgccgcgatagccatcgacaatcagcgtatggccgtgcagcagcgaaggctgaatatccgcccccatcaccgtcggaatgcccagcgcgcgcaccataatcgcggcgtgggagttcgccgcgccatcgcgcaccaccacgccggctaaacgatcctgaggaacctccgccaaggtggtggccgacagttcatccgccaccagcacgatgcgctccggccaggtattgggcccctggatactgtcatcgagatggaaaagcagccgctggcccagcgtgcgcagatcgcccgcgcgctctttcagatagccgtcgctgagcgcggcaaactgttcggcaaatttctcgatgatcttcttcaccgcccattcggccaccgcgcctttatccacttcagcgaacagctcgcggcgcaggcgcgcgtcggaaagcaggtgcgaatagaggtcaaagatggccgccgtctctttctgcgcgccggcagcgtagcgtttgctgtagcggcgaaactcattcgccgcctcttccagcgcgccggtcagccgctcgcgctcggaagcggtatcgagcgtcgaggcttcataaacctgctccatcaacggcaggctgacgtccatccagccttcggcaatcgccacgcctgacgaggcgggcagcgcgcggatgcgggtctgacgatattgaccaaacagcgcgtttagctgggattgagagagaatgccggcgatttgcgtggccagggtgaccaggaaggactcttcgctttcgtcaaactggcgcagttcgcgctgctgcacaaccagcacgccgagcagctgacgccgctggataatcggcacgccgaggaaggcgcgaaagcggccctctttgaccgcgggaatatatttaaagctggggtgcttttgcgcgtcggcgaggttaatgggttcggccaggcggccaaccaggcccaccaggccttcgtcaaaagcgagcgcaacgatgcgcccgcgcggctttttcaacccgcgcgtcgccatcaggtaataacagcgtcggtcattgtcagccagataaaccgaacagacttccgtctccatcgcggcgcagatatcggtgaccaggatatccagcgcctcgtttaaacgcggcgcactcgcgaccttctcgactatttctcgcaaccgagtgagcataatgtgcgtggcttaacctcttttacgtcgatatgcaggcgcgctctgcggcttaggcgtgctttccgccagcgccatggtgacgctggcaaactctttcatcaccctgcggtatacgtcgcgcttaaacgacaccacctgacgcaccgggtaccagtagcttacccatcgccagccatcaaactcaggtgtactgctggtttgcatattgacatccgcatcgctgccgatcaattgcaggagaaaccacttctgtttctggccgatacataccggctttgtgtcccaacgcaccaaacgtttaggcaatttgtaacgcaaccagttacgggttgaagcaaggatccgcacatctttacggcttagcccaacttcttcgaacaattcccgatacatcgcctgctctgctgattcccctggatttatgcccccttgcgggaactgccacgagtgctgaccatagcgcctggcccacataacctggccctggcgattacagattacaataccgacatttgggcggtagccatcgtcatcaatcaccggactacctcaaaataagcttcaatgtgaatgattgtttcacactcgttggaaacggtaaaccactctgtgagggggatgagatcgaataacatttgaataactcacagtaatacccggagttataaacagcgaaagccatacccggacgattttattcactttttctgtggatagagttgtgaagaagtacggaattaaccagggaaaacccggaatcatccgaacagcgtagcgatagcacctgattataatgacctaattttcataaagttagcatgttaaaatttcataattcacagtataacgtgacgatcatcacataagagatcctggaactgatgaaagatcgagcaatgttggttttatccacagattacgcatgtgctctgggcatattttgtctaaaaactcgattttcatctcacgtcaaggctgtaaatggaaacagtagtggggcttttccccagttatcccatttttctgtggataacagggtgtaagatcctgttcattgtcggtgaccagttctggaaaacccggtttcaccattttcacagcggcaaaaaatcgcaaaaaaaaccatatgaatcatcaaattgtcatacttactcaagaaaaggtaaactctatccacaacggatgaaattactgctcactttttagtcagaggttttacgctatgccgaccatcgcgccgctcttatcccccccgcaaagccaggagcagcttctggcccaggcgcagcagctggcaggctattcgctgggggagctggcccagcttgccgggattccgattccgcgcgatttaaagcgtgataaaggctggatcggcatcctgctggagatatggcttggcgccagcgcaggcagcaagccggagcaggatttcgccgccctcggcgtcgagctgaaaaccatccccatcgattcatcaggtcgcccgctggaaaccaccttcgtctgcgtcgcgccgctgaccggcaacagcggcgtcacctgggagagcagccacgtgcgtcataagctcaagcgggtactgtgggtaccggtagagggcgatcgcgcgattcctttggccgaacgccgcgtcggcgcaccgctgctgtggagccccagcgaagaagaagatcgccagctgcgtatggattgggaagagctgatggatttgatcgtcctcggccaggtcgagcgcatcaccgcccgccacggcgaagtgctgcagctgcgcccgaaagcggcaaacagcaaagcactaaccgaggcggtaggcgcccgcggcgaaccgatcctcaccctaccgcgcggtttctatctgaagaaaaactttaccgccgccctgctcgcccgccatttccttctctcctcgaaataacggcctggagatgattaattttttgttctgccgtggcggttgcatataatcgcatctttctattttgcaggactttgaacgatgttatttgcatgggtaaccgatcctaacgcctggctggcgcttggtacgctgacgctgctggagatagtgctcgggatcgataatattattttcctctctctggtggtggcaaaactgcccacagcgcaacgggcccacgcccgccgtattgggctgatgggggcgatgatcatgcgtctggcgctgctggcgtcaatcgcgtgggtcgtcaagctcactaatcctctctttaccgtgctaggccaggagatctcgtttcgcgatctgatcctcctgctgggcgggctgttcctgatctggaaggcgagtaaagaaattcacgaatccattgaaggcgaagaagaagggctgaaaaccaacgtccattcatttatgggcgccatcgtgcagattatgctgctggatattattttcagcctcgattcggtgatcaccgccgtcgggctgtcggaccatctgtttattatgatggcggcagtggttatcgcggtgctggtgatgatggttgccgcccgttcgataggcgattttgttgaccgccatccttcggtgaaaatgctggcgctgtcgtttttgatcctcgtcggctttacgctgatgctcgaaagtttcgacgtgcatgtgccgaaaggctacatctatttcgcgatgttcttttcgattgcggttgaaagtctcaacctgctgcgcaataaaaaaaatccgctgtagcccgctaaaatgcagccctgaaacgggctgcaattcttttttaagacttaactgctttttatgtctcacaaatcaggctattaatatactggtacgaggtgcggctataataggggtgatagcgatgaaaaaatgggcagtattgatttccgccgtaggactggcgttctcggtttccggttgcagcagcgattacgtcatggcaaccaaagatggtcgcatgattctgactgacggcaaacccgccatagacgacgacaccggccttatcagctacgaagatcagcagggtaataaaatgcagatcaatcgtgacgacgtttcgcagattattaaacgttaagtcccgccgtcaggtcgcgatttagcgttttatcgcaccgttgagcagcgttctttattcttcagcattcagagaaaagtcgggataaacctgatctgtccgcgaggattcatcaggccggattccgtcagcccggcttttttgatttttttacttcccctttttctccccctctgccatttttatattcctttgtcggggaacgcctgaccttgttgataaaaaaggaagccggctatgcagtatcaccgtatcccacacagttctcttgaaatcagcacgctggggctgggcacaatgacgtttggtgagcagaatagcgaggcagacgcgcacgagcagctcgattacgcggtgagtcagggcattaacctgattgacgtcgcggaaatgtatcccgtcccgccgcgcccggaaacccagggcctgacggaaacctacgtcggtaactggctggcgaagcgcggcaatcgcgaaaagctgattatcgcctctaaagtgagcggccctgcccgcaataacgacagcagcattcgtcctgaccacaagctggatcgtaaaaatatccgcgaggcgctgcacgacagcctgaagcgcctgcagaccgattatctcgacctctatcaggtacactggccgcagcgcccgaccaactgtttcggcaagctgggctacacgtgggccgattccgccccggtcgtcaccctgctggatacgctggacgcgctggccgaattccagcgcgccggcaagattcgctatatcggggtctctaacgaaacggcgtttggcgtgatgcgctatcttcatctggcggacaagcacgacctgccgcgcatcgtgacgatccagaacccgtacagcctggtgaaccgcagctttgaagtgggcctggcggaagtcagccagtatgaaggcgtggagctgctggcctattcctgcctggcgttcggcacgctgaccgggaaatacctcaacggcgcaaaaccggcaggcgcgcgcaatacgctgttcagccgttttacgcgctacagcggcgagcagacgcaaaaagcggtggcggcctatgtcgatatcgcgaagcggcacaaccttgacccggcgcagatggcgctggccttcgtacgtcgtcagccgtttgtcgccagcaccctgctgggcgcgaccaccatggagcagctgaaaaccaacgtcgaaagcctgcatctggagctgagcgcagaggttttagccgagattgaagcggtgcatcaggtttatacctacccggcaccgtaaggccgtaaaagcccccggaggcgatgctacgcatctgtccgggctacaagttcgtgcagtttgtagcccggacaggcgcgacgcgccgcctccgggagattatttacgccgtccccaaatccacagggcagtaatcgccagggcgaacaccacgccaaagccaatccctacgccgacgacaggaataccgatgctcaccgccagcgaatagaggcccagcatcagcagcatcgccacgttttcgccgaggttctgcaccgcgatagcgttgcccgcgccgaccgtatgtttccctcgctcctgcagcagggcgttaagcggcacgataaagaagccgccgaacgcgccgagcagcagcagcagggcaaacgccggcagcagcgcctgctggatggcgaaaaagatgaccgccacgccaatcaatatcccggcgggcatgcagcgcgacaccgtttccagcgtcaccagcttcgccgccgcgccggctcccagcacaatccccaccgccaccatcgcgttaaggtaggtcggcatggcgttgctggtaatgcccagcgccgccggcacccacagcaccagcaggaagcgcagcgtcacgcccgccccccagaacaggctggtgccgactaacgaaaagcgggtctcaccgttgcgccatagcgtcgtacaggcgctaaagaagctgtgggtcatcggcctgaagcgccacgactgcccgggacgcgccgccggcagcttcgggatccacaggttggcaaccaccgcgccggcgtacaccaccgcgcagacgccgagcgccgccatgatatgccagtccgccaggataccgcccgccatcgagccgagcaggatcgctgcaatggtcgaggactccatcaggccgttcgctttcactaacttatcgccggtggtcagctcgccgagaatgccgtatttagccggagaataggcggcagcgccgatgcccaccagcgtatagccaataaacggattcacgccaaagcagatgcaccccgcgccgatcagcttcaggccgttcgccaccatcatcactcgccctttggcaaagctatcggcaaactgtccgacaaacggcgcgaagagaatgtaagcgcccacaaacaacatctgtaataccggttgactccactccgggtagaacagctgcttcatcagcgccagggtggcgaacaacagcgcgttatcgccaaacgccgaaagaaactgggcgcagataaccgccatcatccctttcgaatacagcgacgtgttagtgtgtactgactcactcatccgaaccttccgcctgttcaaccatgcctttaagggtgacaaagtccggcttgccgctgcccagtaccgggagctgcttcagccagcgaatgtcgcgcggtaccgccagctccggtacgccgtgttcacgggcatagcgcagcagtttttcacgattcagttcattatcggtggtaaacagcaccagcgcctcgcctttgctggcatcctgtttaatcgccgtggcgtgcattttgtccggcgaaaccgccagcgccacctgctcgaccatctccagcgacaccatctcaccggcgattttggcaaagcgcttcgcgcggccctgaatccgcacatagccctgttcgtcaaagctgacgatatccccggtgtcataccagccggcttcgactacgccgtgctgattttccgccgcgggcgcttccagcacgccgggattttccacccgcagatagccgttcatgatgttcggccctttaagctgtaaacggcccccctcttcaataccgggcatggccagcagacgcgcgtccatccccggcaaaatgcggccaacggtgcccactttcgccgccatcggcacgttgatcgataccaccggcgcgcattcggtgacgccgtagccttcaagaatgcgcaggccaaacttgtcctgccagatctgctttgtgctttcctgcagcttctccgccccggcgacaacgtaacgcaggcgataaaaatcatacggattcgcaaagcgggcgtagttgccaaggaaggtggaggtgccgaacagcacggtacagttgcggtcatataccagctccggcaccacgcggtagtgcagcgggctgggatagagaaagacctccgcgccggtaaacagcggcgtcagcaggccgaccgtcaggccaaaggagtgaaatagcggcagcgccgacataaagcggtcgttggcggtaaagtcggcaatggttttaatctgctcgacgttggccaacaggcttttatggctatgcacgacccctttcggattaccttccgagccggaggtaaacagaatcatcgccgcgtcttccggctgctgcgtaacctgagccagcttcggcatcagcagatggccaaaaatccacagcttatcggcggcggtaacctcgccttttaaatcttcgagaaatacccagcgtacctgcgtcaactgctccggcaggtgccagagcttgcctttatcgaggaaggtgcgggaggtaaagatggttttgatttccgccgcggtaatggcgctgctcaggcctttgaccccggcggtatagttcatcatcgccgggattcgtccgcgggcaatcgcgccaaaaatcaccgccgcgcttattccggcgttcggcagcatcaggccgattttttcgccctgggcgctgtatttttccagaatgcgcgccacgaagagggttttggtcagcagcttacggtaggtgtccggctgaaaattgatatcttccacgcagcatttgcgcgcgccgaagcggtcctgggccgccagcagcgactcatacagcgtttcgcgcgggcgcaccgccatccgcgcctccatcatgatctgatgcagcatttcaccggcaattttacgccggtcgcgggcgcgcggcgcatcgggcatcggcagatgcgtcggcggcagcagatgcagctgaatgcgcgggaacaggcggcgcttgaccagccccttcaggcggctaaagtgggttagttcagcgccttcgattctcagcggcacgatggtcgcctgcgacttcgccgccacaaaggcggcgccgtcgtaaattttcatcagcgaaccgctcaccgagatccgcccttccgggaaaatcaccaccggacgcccctgctcaatcaggcggaccagatgttttatcgacatcggtttggtcgggtccagcggcacaaaatcaataatcggctttagcgcgcgcataaaccagcgatcgctgattgaggaatagaccgcaaacaccgggcgcaccggcaggaaaagcgccagcagtacgccgtcaataaaggagacatggtttggcgtaatcagcaccttgtgctggtgcagcgcctgggggtcaccggttaacttgacccggtacaatcctttgaaaagtagtctgaaaaatcccaaaagcataacaactccgtttgaccggttaatcagtcaaagcaggttacatgagaagggacggaaaatgcaccaggaggagcggaattcaggacaaaaaaaacctgcgcatccgcgcaggtcggtgcaagataatcagtacgaaaagcgtacttaaaaaactcaccaatcaatacctctgggatcctgattgtctcgtttttcccgccgccggcgccagccataaaacgcaagggaatgagcctaagtgcaaccagttattacttttttcgtgaactgtaacaacggctaacggcgggcaaaaaaaaacctgcgcatctgcgcaggctggtgtaattaagtggtcaacctgaagttgactccacctatcaatacctctgggatagccagagtatcaatgcaatgaatgggtaaaccagcgaacattcgcaacagccaatcgcaaagtgtaagcaaaggtgtgaattgtccgttcccggaatcattctccgctcccctgtgggtaactatttcacccgcaacgctaatctgcgtcacaattgcattaacccaaaagtaccaacccttgaatctgccgcgctttcccgtaacataaatgccatgtaaacgcttaccctaaaaaaggcctggtatggcgactattaaggatgtagcccggctcgcaggagtctccgtcgctaccgtctcccgcgttattaacaattcaccgaaagccagcgaagcctcgcgccagtcggtgggcgccgcgatggaaacgctaaattatcaccccaacgccaacgcccgcgcgctggcgcagcagtcaacggaaaccgtcggcctggtggtgggcgatgtctccgaccccttcttcggcgcgatggtgaaagccgtcgagcaggtcgcctacaataccggcaattttttgctgatcggtaacggctatcacaacctccataaagagcgccaggcgattgaacagctgattcgccaccgctgcgcggcgctggtggtccacgccaaaatgatccccgatgacgaactggcctcgctgatgcagcaaatccccggcatggtgctgatcaaccgcatcctgcccggcttcgagcagcgctgcgtggcgctggatgaccgctacggcgcatggctcgcgacccgccacctgattcagcaggggcacacccgcatcggctacctctgctctaatcacgctatttccgatgctgaagaccggctgcagggctactgggcagcgttaaaagagagcgatctgccgtgcaacgatcgcctggtgacctttgccgagcccgatgagagcggcggagaacaggcgataaccgagctgctgggccgcggcaggaacttcagcgccgttgcctgctataacgactcgatggccgccggcgcgatgggcgtattaaacgataacgggattgatgtgccgcgtgagatttcgctgattggctttgatgacgtgctgatttcgcgctacgtgcgcccgcgtctgaccaccgtacgctatccgattgtcaccatggcgacgcaggccgcggagctggcgttagcgctggcggagcatcgcccgacgccggagattacccaccttttcagccccacgctggtccgccgtcactcggtgattgcgcccctcgacagcgataaatcgtagcggtataaactgacggcgctggccggataatccaggccttcgccgatatactgccagccaaaacgctcataaaaatcgcggcaggcggagtagagaaatagctcggtatagccctgcgctctggcatatccgatgacgtgctgctgtagttttcccgccagtccctgcccgcgcgcctcaggcgccacgtagagcgccgccatccacggatagagatcctgacggctgattaaatcgcagcgccacaggccgacggtgcccagcagcctctcgccctccacggccacaaaggtaatgggcagcgctcccggcgtctggctatgttcgacaatgctggcgaagaacgcccgcggcagcgcgtcagcgccaaacgctcgccagagccactccgttacgcatgaagcgtgctgcggcgcagcgtagagggggtgaataatcataccagctttccctgaaaaatcggtaccgattcaaagagatagccgtcaaagtccggtgcgtcttcatcggagagctccagcaggctgtttttgacattttcaagatgctgccacattgcctgccaggcccccatcacatcgcgtcggcgcagggcggcgagcagcgtttgccggtccccgagccacttcagccggtacgcccggctggcgatatgcacgttgaactgctgccacagcgggctgctgtccatctgcagccagatgcgctcaaccgtcgccagcagcatctgattttgcgtcgcgccggccagcaccaggtgaaacagccgggcgttatcctggctggtatcgttggcggcaatcgcccgctgttcctgctcgataatccgcttcaggttatcgatatcggcgcgggtggccattttggcggcaaaagcggcgatattgctctccagcagctggcgggcctgcaggatctcgaacggcccgacgtcgctgctcaacatctgttcttcctcgctatcgtcctcgtgcgggatgcgcatcacgtacaccccggagccctggcgaatgtcgaccgtcccctgcagctccagcatcagcagcgcttcgcggacgatggtccggctcacgccgtaggtctcggcgatattgcgttccggcggcaggcgcgacccgatgggatagcgcccctgcgcaatctgtgcgcgtaaatcatcacctatttcctggtagggtttcttttccggcggaatgatagccttctccacaatatcacctgtgcgttatgagcctgcgagtcaatatcggccgctatcttagcaaaatttcagcccggctagcgccactcatcgtcaatatccagcgtcaattcccggctctcgcctagcttacggaaccagctggcggacgccttgggccgccgcgcacgattattttgcagatcgatttcaatcagcccgtagcgatttttaaaggcgttcatcggcgaaacgttgtcggtaaacgcccacagcatgtagccgtgacagttggcccccgcttcccgcgcgcgcagcgtttgccacagatgctcgctgataaaacggatccggtagtcgtcagcgatggtgccttcgccattgcgaaactgcccttcgttttccacgcccatgccgctttccgccacgaaccacggaatattgcggtagtcctgcttgatccgcatcgccatatcaaaaacgatttgcggataaatctcccagccgcgggagttattcatccgccgtcccggtagttcaaagggctcatagtagtaagccggatggaacggcgtctgcggatgccaggcgcgcgatggagccttaacccgatgcgggtagtagaggttaatccccagctcatcaacggtgttgtcgcggattatcgccagctcctccgcgtcataatcccaggagaccccgtgctgttcgagcagagccagtagctcaggcgggtagaggccgtggaccagcggatcgaggaaaacccggttataaaacagatcgtagcgttcggcggcgcgtacatcgtgcgacgcttttgagcgcggataggtgacctccgggttaagaatgcagcctaccgtgccgcgatagcctttctcgcgaaacagccggaccacttttgccgtcgccagcaccttgtggtgattccactgcatccaggtgccggtgttctgctcgtaaggccagcgcagcgcatccagataaacgcgggtctgcaccacgatcggttcattgaaggtgaaccagcgcgtgactttgtggttatagcgggcgaacactttctccgcgtactgcacaaacagctcaaccacctttttcgacgcccagccgccgtactgctccagcagatagccggggagttcatagtgctcaagacagatcatcggctcgatgccgttggccagcagttcatcgaagagctggtcgtagtacgccgcatagtcttcatcgaccgtgacgttttcataatcggtgagaaagcgcgaccagttaatcgacgtgcggtagtgggtcagccccgccagcttcatcaactgcacgtcttcgcggaagcggttgataaaatcggtcgccaccgccgggccgtagccgttatgccagacgcggcggtcgttcttgtaccagagatccggccaggaatcctggcccgctttcttaccgctccagccctcggtttgccacgcggaagcggcggcaccgaggataaagtcgtgggggatcgccatctttactgtcgtcattgtgtcctcatatctgttggctggcctgctcgttctccgcctggcgctgagcgttttccgcgcggcgggaggctattttgacgaacggcagatagatcagcaccgcggtcaggatgcagataagctgcgtcaccaccgcccccatcgaacccgccgtagagagccaggcgttgatcagcggcggggtggtccacggcaccatcaccaccgctttaccggcaaagccggcggcggtcgcgaagtagccaatgctgccggtcaccagcggcgtgatgataaaagggatcgcaaggatcggattgagcatgatcggcatgccgaaaatcaccggttcgttaatattgaacagacccggcccaatcgacagcttggcgatctctttcatctctttgcgtttggtggcgatcatgaccgcgatcagcaggccaatcgtcagtcccgatccgccgatgctcatataaacgtcccagaacggcatggtgatgatattcggcacctctttgccctgctcaaaggcgctcatattgacggtgatggctcccagcagcagcggttcgcggatcggtttgatcatctggttgccgtggatgccgataacccagaacagctgcgcgacaaacatcagcagcaggatccccggcaggctttgcaccacccgctccagcggctgctgcaccacctgatagaccgcgtcatacaggtacatgccggtggcctgatggaaaataaagccaaaggtggcaatcaccgtggtggtgataatggccgggatcagggcggagaacgacgccgatacgttgggcggtacggtatccggcatcttgatcttcagccccttgcggccctccagccagcagtaaatctccaccgacagaatggcgataaacataccgaggaacaggctacgggtatcggaaaactggcgcagcagcacatctttcacttcatgcatttgcccgtcgaccatcatttcgacggtggtcggcgtcacgcagataaagcagatcaccgccagcagaccggggaacaggctcttgatgccgttaatccgccccagctcgatgccgataagaaagaccgcgccaatattgagaaagttaagggtggcgtagttgatcgcgctggtaatgggtttcagcgccgccagaaaagagagcgcctgaaagctggcgagtccgtttttcggatccagcaccatattggagatcagcaccgaaaaggcgccgacgatgatcaccggcatcagggtaataaaagcggattttatcgccatgatgtagcggtagctgttgaatttcgtggcgaaactccccagtgagtcgatcagtttgtcctgcaatgccatagaggatacctcaggtttaagggcttttagcgcaccaggtgtacagccaaacacctattggcataccaaaaaatagccactgaggggaataagttctgtgattaagctcccaacccgttcattggcattccagaaaggcgataattggcataccgcatttgcggttttcttttccctgcgatcaattcctgtaaaagcgtgatcgcgatggttttttaccgcgccatgaagccatatccccctgaatgtctgtgataaactgcggttcaccacgtgatatcaggaatcggatgaatggctacaatgctggatgtctcaattcgcgcaggcgtctctaaagcgacggtttcccgcgtgttgaacggcacaggtcaggtgaaagagagcacccgccaacaggtttttaaggcgatggaagagctgggctatcggcctaactttctcgcccgctcgctggcgaatcgcacgagcaacagcatcggtctggtggtttccacctttgacggcttctattttggccgcctgctgcagcaggcttcgcgccagacggaagcctggggcaaacagctgatcgtcaccgacggccacgatgcgccggagcgtgaagaagaggcggtgcagatgctggccgatcgccagtgcgatgccatcgtgctctacacgcgccatatgagcgaaaagaagattatgtcgctgattgagtctatcgccatgccgctggtggtgatcaaccgcgacgttagccaggcccgggagcgctgcgtgttcttcgaacagcaggacgcggcgtttcaggcggttgagtacctcattacccagggccatcgcgatattgcctgtttgaccgtgccgatgcacacgccgacgggtaaagctcgcctggaaggctatcgcaacgcgctgaagaagcacggcatcaagtgggatccggcgaaggtgaaatacggcgactccaccatgagccgcggctatgaactctgctgcgagctgctggaagagaaaacgccgtttagcgcgctgttttcctgtaacgatgatatggcgctgggcgcgtcgaaagcgctgcatcaggcagggctgcggatcccgcaggatatttcgctgtttggttttgatgacgcgccgagcgcgaaatggctggagccggggctgtcgacggtctatctgccgatcgataacatgatcaccaccgctatcgatcaggctatcaagctggccaacggccagccgatcgagaccataccgccgtttaccggcaaactggtgctgcgcgagtcggtcaccaccgggccgtattacgcataattagcgggcccgataagcgaagcgccatcgggcagcgccttacagcagctcgagcgcgagcagctcttcaatggtctggcgacgacggatcagccgcgctttgccgttgtcgaacagcacttccggcagcagcggacggctgttgtagttagaagacatcgacgcgccgtaagcgccggtatcgtgcagcaccagataatcccccggcgccaccgcaggcagcaggcgggtttccactttccccccctcctgctgggtaaagacatcgcccgattcgcacagcggcccggccactacggtttccacctccgccgcggcgcgcagatcgcggccgtccgcggcgagagcggtaatatggtgatagctgccgtacatcgccgggcgcatcaaatcattaaaaccggcgtcaatcagcacgaagtgacggctgcccatctccttcacgctgcgaacctgagaaaccagcacgccggactccgccaccaggaagcgacccggttcgatctcaagcgcgaccggatggcccagatgtttagcgatctgctcgcgcgccgcgttccacaggccgaagtagtgatcggtatcgatcgcctcttcgtcgtcgtgatacgggatcgacagtccgccgccggcggagatcgcctgcagatcctgcccgaattcaacaacctgacgcaccatcgcgccgcagacctgttccaggtgcccatagtcgaccccagaaccgatatgcatgtgaatccccaccagctggagctgatagcgacgcatcacttccagcgccgccgttaaatggctgtgccagatcccatgcttgctgttctcgccgccggtattggttttttggctgtggccgtggccgaagcccgggttaacccgcagccagacgcggtggcccggagagacttcgcccagctggctcagcatatcaattgagccggcgttgaccgggatctgcagctctttcacccgcgccagggttgcatcgtcgatcagatcggcggtaaagacgatatcgtccggatgctgatgcggatcgtacccggccgccagcgcgcgctcgatctcgcccagcgacaccgaatccaccttcacgccctgctcgcgcatcaggcgcagaatgtggatattggagcaggccttctgcgcaaaacgcaccacgtcgaactggctcaattgggcaatctggcggcggataatctgcgcgtcgtaaacccaaaccgggcagccgaattcggcgggcagacgcagcaggttttctgcgctcaggtcggtatcggtagcgtaaagcgagtgtggcataaggaactccggtgctgtgtgtgcgttatttctgttttttacgattacgccacagcgcgtacgcaataaaaaatatcgttttattgccagtctatgcaaaaatgatatggcttgcgccacttaaggaacccccatgcccgccgtcaacctgcgtcatattgaaatctttcatgcggtgatgaccaccggcaatctgaccgaggccgcacgcatgctgcatacctcgcagcccaccgtcagccgcgagctggcgcgttttgaaaaggtgctggggttgacgctgttctcccgcacgcgcgggcgcctgcagcccacggtccaggggttacgtctgtttgaagaggtccagcgctcctggtacggtctggacagaatcgtcagcgccgcggaaagcctgcgcgagttccgccagggcgagctgtcgatagcctgtctgccggtcttttcgcaatcttttctgcccccgctgctgcaatcctttttaagtcgttatccgcaggtcaatattcagatagtgccgcaagaatcaccgctgctggaagagtggctgtcagcccaacgtcacgaccttggcatcaccgaaacactgcataccccagccggtacacagcgaaccgaacttctctgtcttgatgaagtttgtgttctgcctcctggccacccactggcccaaaaatcggcactcacgccgcaggattttgaaggcgaaaactacattagtctttcccgtaccgacagctatcgtcagctactggactcgctctttaatgaatatcaagtaaaacgtcgcatggtgattgaaacccacagcgccgcttctgtctgtgccatggttcgcgctggcgtggggatctcagtcgtgaatccactcaccgcaatggactacgccagtagcggagtcgttatccgccgatttagcgtttcggttccgttttcagtcaatctggtgcaccctttacatcgcccttcatctgcgctggttgatgcatttagcagccatctaatacaccaactacctgatatcattgaatcttataactgctggataaatttataaattcttaaaaaacatatcgcatagctggctcaaaatattttgttaatttctcacatgttaaaaaataattaacaatatatttaaagcgtgtcagcagcaccggccattcacgatcccccccatcagttcatgaccataagtaaatttcaaaacgagcacataatattcaaccaatggtgaaatatagatatgcgtcataatattattataatgatataattcaacccaaatgcatacataaaatcgataattaaagataaactgcatgtagaattaactacaactaattttatttaagaaaaacttgaatataatatttatcgaccccccccccattatggatgatggatcccatgaagatgaaatacacatttgcacttcctttacttatgactctgagcacagtcatctctccagcggcgcatgcaaccggaatgaccccagaattttctgtattactcattaataccgatgataatggtgccagtatgaacgttaaaaatacggatgataaggccgcgctcctttacaccacgataaccgatattgcagggcctcagaataaaaacacaaaactcattgcaacacagccaattgttcgtgttgaggctggagaaactcagcgtgtacgttttgtgctggatattcagactccctttaccgttgaacaatataaacgtgtttcgtttgagggcatccagcaggcaaaaccagcgggtgctaagttaattacagctacaattcgccagacgattccagtgatcattcgcccaaagaacgtacctgactacaccaccccatgggataaattagtctggaaaaagacaggaaatacactcactgtaaataacccgagcccttatgtcgttcgcctgtcgcaaaaaaatctccaccgttccttccggtagtaaaggtatgttacgcaacacctggttactgccgggtgaaaccgaaactataaaaatggataaaggtgttactgacagccaaataaaaatatctccagcatcccgtttcggtattatggtacaggattacattgccactattaaaaataactaattcgctgttatttcagagcatgcattgccgtttctgctctggctcaaatggaattgtgcttcatgaaaaacagattttattcgggtgcatacctgtatccacttattgtcttctcttcttgcacgtttgctggaaaatttcctgaatcattatcaggcagggtcagctcatcaaatatggttcttgccagcttcgatattaccacgttgaaaaatcgtggtatttcccctgaagtcgctgagtatttcgcccacggagcacgtttttcgccggggatgcaaaaagtcagcctgacgctgaatggtgatgaaaagggcgatatctcgctgttcttcaataaatcaggtgagccttgctttgacaaagaatttaacgatttcgtcggattaaaagagccagataaagtgacagacaatgacgataaatcggatgcacgcgtctgctatgactatactgcaacctggccggattcggtcattaagctggaccccggtcaggaaagagtcgctctcatcgtgcccggtaatgcattggataatcgtaataaaccgaaaaactatcaaactggtggtaatgctgcactgctgaactacaacgtattcaccagccagagccggtacagtggtggtaactctaactataaccaggggacgtttgaggctgggttcaacgtcgccgactggctagcccgtagccaggtgattgtcactgattccaatggcgaacaagacagcagcgtactgtatggctacgttcagcgaacctttagcggtattgaaaagacgctccaggccggggcgattaacatccagagcacaccgtttagcttatccgggattaacggtgtgcagcttacgccagaaaccgcgttaaacggagaattgggtagtggtatcacagtatccggcattgcccgcagcgatcaggctcgtgtagaaattcgtcagaacggcgtattgattatgtccacgctggttccggccgggccctttacgcttaacgatgtccccattgccaacaacaatacagatttattggtcgaggttaaagagaccaacggttcatccagccagttcaccgtgcctgcggccaatttagtcggtgcccgtctgcgtgcgccgcagggatgggcattcgctggcggtacgctgcgtgatatcgacacaaagcatgacaaaccgtggatattaacggtatccaacggctggcagattgcacaggaaatcaatctcagcgcaggggttatgacagcggaaaaataccagtctctcgccgccagtactaactttgtgccatcaaaatcgctgtcattttatggcacgacgcttggcgcgtgggatcagcgcaacgatcattccggaaatcagtttcaattggggatgaactaccgactcccctgggacttttccgtcaacctgtcaggcacccacaatacggccggattccgcacgttgctcgacactcttcaggatgaagatgacgtcacaggcataaaaaatagctatagcgcatcattaagctggtcacatgcttatgtcggctcgttgtcattttccctgtcacaatctcagggatttgataacaacagtgattcccgccagttcatgctgaactggggaaaaactttcagatatgccactgtaaacaccagttggcagcatgcgttaagtacacccgatactgacaataacgatagctaccatgacaacgacaccttctacgtcagcatcaacatcccgtttggtcgccacaatgtacagagctatatgcgtgacgatggcgagaaaacccgttacggcctgcaggccaacggcccgttaagtcagaactcatactacaacgtcacagcagaaaaaggcgacgacgacaatgataaatacgttgcggcaggattcagttccaacatgcactacacctcgctgaacctgaacgcgtcgaaaactggcgatgattttaaaaattactcagccaatatatccggcggcattgtcgcgcatagtcagggcgtgacgttctcaccgtatgccgttgatgacacctttagtatcatttcattgaatgacaacgtctccggcgtagaggtttcaacaccacagggaccggtatggaccgatttctggggccaggcagtatctgcctccgccccggtttacagagtaaataccctacaaataaacaccgagaccctgccgaaaaatatcgacatcaataatgggataaagaaactaacgccgggacatggttcagttacccaggttaattttggggtgattaaagtacgacgcgccatgctaactctgcatatgccagacggtaaaccgatcccgaaaggcgaaacgctggttgacgctaaaaatcagtatgtcaccaccgcagtggaagacggagtggtctttatcaacgatgtagatgccacgccggaaatttacgccaatgtcgatcagcaaggccatcaatgccgtgtgcaattcactctggatgatcagaacagtgaacagagtttttatcaaaaagctgatgcaacgtgccaaccgtaaaaatggggttaatgatgaataaactaccttccgcactgctggtattcggattaagcaccagtgcttgtgtactggcggactataccgactgtaacgtgcaaattgcgcctgccagccaaaattacggaagaattcataaagatgaattgaattttactgcaacagataaaggacaggctgctgcgttaaataaacgacaggcccagttatcagttatctgtccacagaaagaagcgttcgacatttcattccttggtagtatgaccagcaacggcgatctgacgttctcggataccggcaaagtcatgttaacgataagtaatatatcttctgacgaaggagcattatttataaaaaggatttcaggaaaagatattagcaccgaatccgtatcctcactgcgaatatacatgggagataaagtaaaacctgccgatgcaagcggaaataccgtatcgatgcaaaatttcacagcaacactcaatatcgaaccgtgggtagccaaaagcacttacagcgatttagcgaacgataaaacactggaagggaatttaactgttcgtattgaacaaccgtaataactatttccaataatcgaaatattattacggtgaataatatgaaccgttaatcaacaaaagtgatcacttaaaatggagtttattatgcaatttaaaaaactgtcacttgccgcaggagtttttggctcttttctggcaacggcatttaccgcacatgctggtaccagcgccaccatgaccatcagcggtatcgtcaccccatcagcctgctcgattgccctgaccggtggtggcacgctggattttggcccggttcatgttgatgccctgccatccagcggcacctatacaatgaccccaaagaccattgataccgtcgttgactgcaaggataccgagcaggccgtggcgataagctttgtcgataaccgcaaagattctgtcgccatccactctgatgaaggcaccgatgccaacaccgctttcggcctcggcacagcggatagcatcaatatcggctcttacggcattaaaatcagcaaggtgaccgcggagtccactgaaggtagcctgctttccagcaccggcaaagccatgaccgatacctggagcgcactctcttccgatacctttgtcaataacggtaccagcccacagtacatcacctacaccgacgcgggcggtaacgccccggttgcgaagaagaactacaccttcaccctgcaggttacaccgtctatcagcagcgatatgaaggccatcaccagcaccgccgagtttgacggtaacaccaccatcaatatcgattacatgtaagggaagaaacaatgaaaacaggaatgtttaaatactctctgctggcggccacaatggctttttccgggctgacaatggcggtgagtccatccgcaacactgctggtaaaaggccaggtttctaccggtacctgcaccgcgacattgtccacgccaaatattgacctgggaacgatcagtaccgataaactaccagcgactgggtcatattttgtaaaagataccactaccaaacttgttgtcgactgcaccagcccgttaaaataccaaatatcaatgaccgataatcgcagtgacagcgcggtttcagcatcggatcttgggaatatgtcgagtggagctgctacaacgattatgggattgggaaaaaccgcagatggcagtaaaaacattggcggttattttttgtcattcatcgaagacggtagtaacagcgcagtaaatggtagcaccagcttatcagttacccgcattggtagaacaactgcatcagactccgattggaaagtactaccagacgctgctggtactaatacttatcattacgcaatgagtccactaaacaacgccgcaggtggcattggtaatgtcggttatatcgctttttcaagtacaggtgatgctgtgcctggagcttccacatcggctacatttgctctgctgtccagattctatctttccagtgaattacaatcaatcaccgaccaggaacagattgacggcagcgtgaccttcaatcttgattacctgtaatcggtaacagtgtttaagccgggaggaattctcccggcttttcataaacccctgacgtctttactgccgcttccttgagctggtttggccaggtctaaaaagcatctaaaattgggctaaccatgcgctttccagccctcagcatcaggaaagcataaactccaccgcgtccgccgcgtggatcgcggccgtatcaaacaccggcagcgggctgctctcttccggcaccagcaggccgatttcggtacagccgaaaatcaccccttccgccccctgctccgccagggcctcgatgacctgaagatagtagtcgcgtgaatgctcgctaaagacgccgaggcacagttcatcaaaaatgatctggttaatccgcgtgcgatcgtcagcttccggaatcagcgtatcaatagcaaactgctgctgcaggcggccgcgataaaaatcctgttccatggtatagcgcgtgcctaatagcgcaacgcggcgctggccctttgcgataatcgctcgtccggtagcgtcggcaatatgcaaaaacggcacgtcgcagcgcgtttctatcgcctgcgcgactttatgcatggtgttggtacacaggacgatcccctcggcgcccgcctgctgcaggccggccgccgcctgggcgaggatctcgcccgcgcgctgccagtcgccgcttgactggcaggcttcaatttcgtggaaatccacgctgtgcagcagcaggctggcggagtgcaggccgccgaggcgcgctttaataccttcgttaatcagccggtagtaaggaatcgtcgattcccagctcatgccgcctaacagaccaatcgttttcatcatccctccttgtgtgaggttttcagtaaaacaaagttgtgatcgactttccacttctcccgacgatcgtttccttttagaagattatgcgatagattaaatgaaacattgtttcatttaattacaggaccagcggatgtttatttttcataaagagaccacccttgaagatctgggtaatggcgtcacccgccgcatccttgcgcacgatggcaagatgatggcggttgaagtgaacttcgaagcgggcgctatcgggccgatgcataatcacccgcacgagcagctcacctatgtgctctccggcgagtttgagttcaccatcggtgatgaaaagcacgtagtcagcgccggcgatacgctctataagaagccggaaattatgcacggctgcgtctgccttaagccgggcacgcttcttgatacctttacccccgttcgtcaggattttctgcaaaagtaatctctcctgccccagggcatgccgggcatgcccaccattttctgaacttttccgctaataataattgtcataaagtatgtcgtagcataatgattagcagagcaattaatcccgcctgaatagcctcactgcgcctgccgctcatccttttctatgacctggcctcctgcaaaatgcgcgcgccagcacctttttgaaacatcgtttcgactttgatcacatttccgcgatcaaccgaatgactccgtaataaatagcaataaaataaaattaaaacggcgttttacaaaatcaggacgctgggtaagacaaaatcaaaaaacagatgttctccagggacgacaagcgcgcaaaaacgctcaacacacgcaccgttaacaaggaatgattcaccgctgacataccaggaacgcattaactttccggcggcatgggccgcgggaaaggcagtaaccccgaatccgtattacaaactcgtaagccaggtaggtatgtatgaatgaaaacagaatgctgggattggcatggatatccccctatatcatagggttgatagtctttaccgcctttccctttgtttcatctttcttcctcagtttcactgagtacgatttgatgagtccaccggtgtttaacggcatcgaaaactatcgctacatgctgaccgaagatggcctcttctggaaatcgatgggcgtgacgtttgcgtatgtctttttaaccatcccgttaaaactggctttcgcgctggggatcgcttttgtcctcaactttaagctgcgcggcatcggttttttccgtaccgcctactatatcccgtccattctcggtagctcggtggcgatcgccgttctgtggcgcgcgctgtttgctatcgacggcctgctgaacagctttatcggcgtacttggcttcgacccggtcaactggctcggcgagccctcgctggcgctgatgtccgtcaccctgctgcgcgtctggcagttcggttcggcgatggtcatcttccttgcggcgctacagaacgttccgcaatcacaatatgaagcggcgatgatcgatggcgcgtcaaaatggcagatgtttatgaaggtcacggtgccgctaatcacgccggtgattttcttcaacttcatcatgcagaccactcaggcgttccaggagtttaccggcccgtacgtcatcaccggcggcggccctacctactccacctatctgttctcgctctatatctacgacaccgcctttaagtacttcgatatgggctacggcgcggcgctggcatgggtgctgttcctggtggtcgcggtctttgccgccattgcgtttaagtcttcaaaatattgggtgttctactccgccgataagggaggcaaaaatggctgatatccaacaaatctctgaagcaagggacatcgccgaacgtgaagtcgcgcggacgctgcgtcgtgaaaaagtcagccgctcgattcgctacgtgatcctgctgttcgtcggcctgctgatgctctacccgctggtatggatgttctcggcgtcgttcaaaccgaaccacgagatcttcaccaccctgagcctgtggcctgcccacgcgacctgggatggctttatcaacggctggaaaaccggcaccgagtacaacttcggccactacatgctgaacaccttcaagtatgtgatcccgaaagtgctgctgaccattatctcctccaccatcgtggcctacggctttgcccgcttcgagatcccgtggaagaaattctggttcgccacgctgatcaccaccatgctcctgccgagtaccgtactgctgatcccgcagtacctgatgttccgtgaaatgggcatgctgaacagctatctgccgctgtacctgccgctggcctttgccactcaggggttcttcgtcttcatgctgattcagttcctgcgcggcgttccgcgcgacatggaagaagcggcgcagattgacggctgcaactctattcaggtgctgtggtacgtggtggtgccgattctgaaaccggcgattatctcggtggcgctgttccagttcatgtggtccatgaacgactttatcggtccgctgatttacgtctacagcgtggataaataccccatcgcgctggcgctgaaaatgtccatcgacgtcacggaaggcgctccgtggaacgaaattctggcaatggcgagcatctccattctgccgtccatcatcgtgttcttcctggcacaacgctacttcgtacaaggcgttaccagcagcggaattaaaggttaagagggaaatatcatggctgaagttattttcaacaaactggaaaaagtctactccaacggcttcaaggcggtacatggtatcgatctgaaaatcgcggacggcgagtttatggttatcgttgggccgtccggctgcgccaaatccactaccctgcgcatgctggccggtctggaaaccatcagcggcggcgaagtgcggattggcgaaaaaatcgtgaataacctcgcgccaaaagcgcgcggtatcgcgatggtcttccagaactacgcgctctatccgcatatgacggtgcgcgaaaaccttgccttcggcctgaagctgagcaagctgccaaaagaccagattgaagcccaggttaacgaagcggcgaaaatccttgagctggaagagctgctggaccgcctgccgcgtcagctctccggcggccaggcccagcgcgtggcggttggccgcgcgattgtgaagaaaccggatgtgttcctgttcgatgaaccgctctctaaccttgacgccaagctgcgcgcctcgatgcgcatccgtatttccgatctgcataagcagctgaagaaatccggtaaaccggcgaccaccgtgtacgttacccacgatcagaccgaagcgatgaccatgggcgaccgcatctgcgtgatgaagctgggccatatcatgcaggtggataccccggacaacctctatcacaagccgaaaaacatgtttgtggccgggtttatcggcgcgccggagatgaatattcgtcccagcaagctggttgagcaagcgggtcgcctgcatctgaccgttggcgacgggctgctgccgctaaacgacagattgcagagtaaggtcgagacccataagaaccagcaggtgttctttggcgtccgcccggagttcgtctccatctccgatgaaccgtttgctgaaggctcctgcgccggtgaaatggtgcgggtggaaaacatgggccatgaattcttcgtctacctgaaggttgccgattatgaactgaccgcccgcgtgccttccgatgaagcgaagccaatgattgagaaagggcttcatcgcacggtgcatttcaagttcgatctcaacaaatgtcatatctttgacgccaaaactgaacagaacatctctctgtgaaccctggagtattaaaatgaaaaaagtgcttttaagcgccgcaatctccgcaactttgggccttaccgcgttaccttccatggcgaaggatgtcgacctgcgtatgtcatggtggggcggcaacggccgtcaccaggtgaccctgaaggcgctggaagagtttcataaacaaaacccggatattaatgttaaagcggaatataccggctgggatggccatctttcgcgcctgaccacgcaaatcgccggcggcacggagccggacgtgatgcaaactaactggaactggctgccgatcttctcgaaaaacggcgaaggcttctacgatctgaataagatgaaggacgtaatcgacctgagccagtttgatgccaaagagctgcaaaccaccacggtggacggcaagcttaacggtatccctatttccgtcaccgctcgcgtgttctacttcaacgacgagacctggaaaaaagccggcgtcgagtacccgaaaacctgggacgagctgatggcggcgggtaaaacctttgagagcaagctgggtaaacagtattacccggtggtgctggagcaccaggacaccctggcgctgctcaattcatatatgattcagaagtacaaccagccggctatcgacgaaaaaaccaagaaattctcctacagcaaagagcagtgggtcgaattcttccagatgtataaaaagcttatcgacagccacgtgatgccggacaccaagtactatgcctcgttcggtaagagcaacatgtatgaaatgaagccgtggattcagggcgagtgggcggggacctatatgtggaactccaccataaacaaatactccgacaacctgaagccgccggcgaagctggagctgggcagctatccgatgctgccaggcgccaccgacgcgggtctgttctttaaacctgcgcagatgctctccattggtaaatccaccaaaaatccggaagcggcggcgaaggtgatcaacttcctgctgaacagcaaagaaggcgttgagacgctgggacttgagcgcggcgtgccgctgagcaaagtcgcggtgcaatacctgaccgaaaacggcgcgatcaaagaggacgatccggcggtatctggcctgcgcctggcgcagtccctgccggccaaactctcggtgtcgccatactttgatgacccgcagatcgtcgcccagttcggcacctctctgcagtacattgactacgggcagaaaaccgtagaagagacggcaattgacttccagcgtcagtctgaccgcattctgcgccgcgcgatgcgctaacaacccgttatcggtccctaccccgcagctccggctgcggggtatttttttagcaaggagtgaatgaatcatgaaaggcaaaatcatcccgctgagctttctgcatacgcaggacagcgaaaccggtcaccaggtgatccggatgacgccaccgcatgttatctgccaccgcaactacttctatcaaaaatgctttacccgggacggcagcaagctgattttcggcggcgcgtttgaaggccactggaactactatttactcgatatcgccaggcagcaggccacccagctcaccgacgggccgggcgataacacctttggcggtttcctttccgccgacgaccggtcgctgtggtacgtgaaaaacaaccagcagctgcgccgtgtggatctggcctcgctggaggagcaggtggtatatcaggtggatgaccaatgggtggcctacgggacctgggtcgccaatagcgattgcagccagatggtgggtatcgaaatcaaaaaaagcgactggcagccgctgaccgactggggcaagttccgcgcattctacttcaccgagccggagtgccggctgattaatatcgacctgcgcagcggcgagcagcgcgtggtattgcaggaaaaacgctggctcggccacccgatttaccgcccgtttgatgacggcaccatcgccttctgccacgaaggcccgcgcgatgctatcgatgcccgaatgtggcttatcaacgctgacggcagccatatgcgcaaggttcgccagcaccggtcgggagagagctttacccacgaattctgggtgccggatggttccgcgctttactatgtcgcgcatcaggaaaacgatccgcatcgctatctgtaccgcgccgacccggcaacgctggaaaatcgccagctgatggccattcctccctgctcacatctgatgagcaatcacgatggcaccctggtggtcggcgacggcgcgccgcacagcaccggcgatatacagcttaacgatccgtttatctgggtgtttgatattgccgccgataagcagactgcggtgtgccgccacgactccacctggaaagtgattgaaggcgagcgccaggcgacgcatccacatccgtcattttcaccggataaccgctgggtgctgtttacctccgataaagagggtatgccggcgctgtatctggcagaggtgtagtgattcggcaacgtcccggctcgcgcggtgcttagccgggctaccgctctctgcgggccggtagcccggacagatgcgcaagcatcgcctccgggacattatgcctctctgcgcgctgctcccgggggcggcgcaaagcgcctgcccgggctacagccgtctgcgacccgggaagaccgtcagaagaaatatttaaaccgcacccgcgcaccgtagcgttcatcggtgttgccgcttttcatcgccgatgaatcgagccatgacgcataggccccgagataaatattaaagttcggcatatccataatattcggcagatgccatgaggtatgaatggtgtgaatgtcgtagcgccccggcgccagaatcgcgcagtcgctatcacactccgcgttgacgccggacatattaaactggtcgattttgttatgcgcatagatatagcccagctccacgcgatgccataacgcattgataccggcgctgaaatccttttcatccgccgcgtccagatacgcggtgcttaagttcaccaccgccccgtcctcggcatcggttttcagcgtgttccagctcatcgtcatgccgtagccggtgcggctggactgatcgacccaacgtccattctgattctcataaccgtaagcattattaacgaggttactctccatcgctgccgccaccgaccaggcgccggattgccaggccgcgaccggacgcacgtaaaccacatttttacggttatccagcgcgttgccgtgataattctggtccacgaacagcgagctgccgtcctccaccagcgtattcacctcaaaataccagttatcgagatttttactcagcaggaagttgccgccgctgctgctgcgtccgcgcccctctttcatcatataaatatagccgtagccgtcgctatacagatcgttcgccgtgttgccggaatattcaacaaacgtatcctgatttagcgggaacatatcgtaggcttcgaagcgaccgattttaattttccagtcatcctgctgaccaaagaaaaaggccgcatcatcaagattcattttaccgttcatatccgccagcggctgcacgctgaatccggcatatttaccgttagcccctttgcgtaatccatcaaagcccagaagaatacggccgttaatatcccagcgctctttatctcccggcgcccagtttttattggcgctggttttcaccgacgtcaggctaccggtgcggctggcgccgtccatattaaactcaacatcgccatagaattttaattcaccataatcattaagttgtaaagcgggtttagccggtgcggcgctggccaccgtcgtcgctggcgcctcctgtttttttagcgcgcggatttccgcctccgcgctggccgcccgctgctctgtcgcctttagccgttgttccatttgcgccagccgctcctcaagggataacggcgcctgagcattagccagaggggtaaataaagacgtcagaacacacccgacccagattttattcatcggaataaccctttattatttagttaaatagtattttttatttatgggtaaagctcgacgacagtgacaataataacccgcccatcgtcgaagacgggttattaacaactattcagtaaaacttattccagctgccaggcgccggcttcggttaaataagccgaaccgttccaggcaaataaagacaattcgcgacgatcggcatccggatatatacgactgctaagacaggcctcgccatcattaacaaacacttcgacggaagagctatcgaagaatatccttagcttcagatcggcgccttcgttcaacgggacgctgcgggtgccgcacaggccatgctgcggatagtgccgctcgagcaccaggcgctgcatctgcgcatccacgtaaacgcgcaaaccttcgccgaagctgaggccatactgctcggcgctgctgttcaggccatcccagtgcaggatcacctccatcgcttcgcagttctccaccatcgtggtctgctggtttttcagggtcgtcaccggccacgggaagctggcgccgcgcatgctctcgacctctttcgccggacgcatctgcagtcgattatccgcgctcaggctcagttcacgcggcagcgacagcatgcctgcccagccatcctgctgctccggcagcggcgactcccacatatccagccagccgatgacaatgcggcggccgtcgggagtgaggaagctttgcggggcataaaagtcgtggccgtgatccatttccacaaactcgccctcacgcacaaacgcctgccccggccgccattcaccgagcagatagccgctctggaacaggttgcggttttgatagcctttagccgccagcccctgcggagagaacatcagaatatgcttgccgttgagggcgaagaaatccgggcattcccacatgtagcccatctctttttccgcctcgtcaaggacgccggcgtcctgccactggcgcagatcggcggaacgatacagccgcacctggccggtgtcgccatcgcgagcgccgacgatcatgtaccagctgtccccttctcgccacactttcgggtcgcggaaatggtgcatgcccggcggggtgtcgaccacgatcccctggcgctcgaagtgaatcccgtcgcggctggtggccagacattgcacctgataaaggttggcttcatcgctgggatcgccatgaaatttatgcccggtataaatcaatgccagcgtatcgccatccaccaccgcggagccggagaagcagccgtctttatcctcggggccttccggggccagcgccaccggcagatgttcccagtgcaccagatctttactgcgcgcgtgaccccagtgcatcggcccccatttggtggagtacggatggtgctggtaaaacgcgtggtaccagccgtcaaaccagaccaggccattgggatcgttgatccagcccgcgcgggcggccaggtgatagcgcggataccagcgcaggttcagctgttcatgtttagcctgcagttcttgctcagcccgggaaattgaatacgtcatattcattactcttttgattcagatagcggaagtttgcggcattagcgggtccgaagaggacttactggagcgcaacaagaagatggagataaaggtggtgcagaacaccagcagtcccataatcagataggactgggcgaagccgtatttctcatagctatagccagcgagcggcgacagaaccgtcgcgataaccgagctggtgcaggcaaagccgaccagatacagcgtggatgaaagacgcttgtcgaagtttaagctgttgtatttaaagatagataccagcagtaccggcagctcgacggcgtggagcagcttggtgatggagatcagcagcggcccctccaccagcccggaagccaccatacgcatggccatcaccattccggcgaagatcaggccgtttttcgcgccgacgcggttaaccagccacggcgcgcagaacataccggcggcttccaggaacacctggaacgagttcaggtagccgtacatcgcgttgccttcctgcagggtcgggaactgggaagagaagtagaccgggaactgctggtcataaacgccgtagatgcaggtgccgatgacgaagaagaccagcgcccaaaagcgcggcagggtcagcagacgcagggcgtcttccagcgtgactttaccgccggataccgcctcctgcatggcatgcggcgcggaagagacccgcagtcgcgccagtaggaaaaaaaagaccagtccggagcagctggccaccgcgaagtttaagtgcgggttaatgttgaacaacaaaccggcgaagaaggtcgccaccgcccagcccagcgagccccacatccgcgccttgccgaattcaaactggctctggcgcgcgacgcgctcggtgtaggactccagcacgccgataccgccgttgaaggtcagtccgatataaatcccgccgaagatgctgccgagtaagacgttaattttgaggaggtagccaaacgccatataggccgggccggagaggatcagcagtacggtgatgtaccagagcaaatttttacgcaggccgagtttgtcctgaataaagccgtagcacacctgcgcgaaaagcgcggagacggaaagcaccgagaagataattcccgtatcccccggcttaagccccacttcctgatgtagccagatagagagcagcgaacctgaagaggaccaggtcacgaaaaagaaaaagagtaacgcactgagtaacggatagctgtgagagtgatgcgctttcatcatgacattctcatgttggagtaatgctattatggtaacgttaacaaaaagcgaaactcacttcgttttgttgagattcatgatgttaatcacaaaagttaacgttaacataaaagggatgagatctcgatcaaatattcatcttcttcgctcgcgctacgtgtacgatagaatattgtatgatccttttacatcagtaacttagttgaccccgctgctggcggcaagggtggagcacttaatatggcatctctgaaggatgtagcaaagctggcgaatgtctcgctaatgacggtctcccgggcgcttaatagcccggaaaggctcaagccggagaccctggctcgggtccaggcggctatcgaagagaccaactacgtccccgacctgtcggcgaagaaaatccgcggcgctcacgcgacgccaaacaccatcggagtactggcgctggataccgtcaccacgccgttctcggtggagattacgctctccatcgaagagaccgcgcgggcgcacggctggaacagcttcgtggtcaacatgttctctgacgatagcccggacgctatcgtcgacctgctgctctcccatcgtccggacggcattatctataccacgatgggtctgcgtcaggtgccgctaccggccaagctgttaacccttccctgcgtgctggccaactgcgaaagcctgcacgacccggtggccagctatatcccggacgacgaacagggtcagtatacggcggtgcaggctctgctggccgcgggctatcgccggccgctgtgcctgcatctgccggcgaatcatctggccaccgtccgccgccgtcaggggctggaacgcgcctgccgggaagcgggtgttgacccggatacgcttgctcactgctatatggcctacggcgatgagcactatcgcgatattcccgcagtcgtgctggcccatattcagcagcgcaagccgcagttcgactcggtgatttgcggcaacgaccgcatcgcgtttatggtctatcagacgctgctggcgcgcgggctgcgcattccgcaggatgtggcggtggtcggttatgacaatatggtggggattggcgatctgtttttcccgtcgctctcaacggtgcagctaccgcactatgatatcgggcgcctgagcgcccagcacattattaacggcgacagccatcgggagacggtgaaagtagccagcccgtggctgccgcgcgagtcgttgtaattaattgccgatattgcgcagcttctcgccggacatcagcctgcgttcaatatgctccagggtgacgtttttggtttccgggatcagccagaacgtcacgccgataaaggcgacgttcagcgcggtataaagccagaaggttcctgccgcgccgatcgcgtccagcagcgtcaggaaggtcgcgccgataatcatgttcgacacccagttggtggtggttgagcaggtgatgccgaaatcgcggcacttcagcggctgaatttccgaacacaggatccacaccaccggcgcggcgctcatcgcatagccggcgatacacatcatggtcatccccaccgacagccaggagagaccgctggaggcggtgccgttatcaaactgcatcagacagtagcccagcaccagcgtgccgatggccatcacgctaaaaccgattttcagcgccggcttacgtccggccttatcgacggtaaagacggcgataaaggtggcgaacataaaggtcaggccaaccaccagggtcgcgaccatctgctgttcggtggtggtgaagcccgccattttaaagatgcgcggcgcgtagtacatgatgatattcataccggtaaactgctgcatcgcctgcaacagcatgccgaggaataccgcccgccgcacgttgcggttgaccttaaacagcgcccagccgccctgcttcagcttcaggctttcgcggatctcgttgagctcgtcacgggctttttctgacgtgtcgcgcagcatccgcagcacctcttccgcttccacgtgacgccctttttccgccagccagcgcgggctgttcggcaggaagatcaccagaataatcagcaccaccgccggcagcgccagtacgccaagcatcgcccgccagttgccgctgtagctgaacgcggtgtcggagagaaacgccatcacgatacccagcgtcaccatcagctgatacatgctgatcatcttgccgcgcacgttttcgctcgccatttccgacaggtacagcggcgcggtataagaggcgatccccacggcgaccccgagaacgatccttgccaccagcagcatttcgacgctggtcgcaaacgcggagcccacggagccggcaacgaacagcaccgcgcccaccatcaggctgtatttgcgcccgaggcggaaagagagccagccgttaaataacgcgccgatggcggctcccagcatcatgctgctcaccacccactcctgcaggcggctggataaaacaaaatggtcggtaataaagggcagcgccccggcaatcaccccgatatcgaggccaaacagcaaccctgccaccgcggcggcaatggagacaaactgattcatgcgccgggtatcgcgctgcgtacgcggcatggttgtagagtcgtgactgagagtggtcatttttttcctgccagacgaagtaagacatacgatgaaactacgggatcggcggcgtaaggtgtcaggcaggacacgccaaagatatggattaagttgctacaggcaatggttttgtgatggacattcaactttcagaagagcagaaaataagcatttcatcttcaacaacccctgttacatatagatacttacctcaaaaacaaataaaccatatggactatttcagtttcatcatatggacaattgttattcagacataaaaaaaccctgccgaagcagggttctattttgcgctgataacgcggcaaatattagcgcgccagccagccgccatccaccgcgacggtgtagccattgatgtagtcagaagcgctggaggccaggaagaccaccggccccatcaggtcgctcggcagaccccagcgtcccgccgggatacggtcgaggatctcgctgctgcgctgttcgtcggcgcgcagctgctgggtattgttggtcgccatatagcctggcgccaacgcgttgacgttgatgccgtgcttcgcccactcgttcgccagcagacgagtcacgcccatcaccgcgctttttgacgccgtgtaggaaggtacgcggatcccgccctggaaagagagcatcgaggcaatattgataatcttgccgccggtaccctgggcaataaagtgcttcgccgccgcctgagacataaagaacacgctcttaatgttcaggttcatcacgtcgtcccagtttttctcgctgaattcgatcgcgtcttcgcgacggatcaggccggcgttgttaaccaggatgtcgatatggccgaactccgccaccgcgcgctccagcagctgcgggataccgtcaatctggcgcagatcggcggtcaggctgagaaaacgacggcccagcgccgtaacgcgctcaatagtttccgtcggttcaacaatattgatacccacgatatcgcaaccggcttccgccaggcccaccgccatgccctggcccagacccgtatcacaaccgctcaccacggctactttgccctgcagggagaatgcgtcgagaatcatacttggttccttaatctttcagagcctgtgtaggtacaggcaaggttctgatagtccagcctgcggcttgtgcagacccttatggtttgaagaactcgcagggattgccccttctaaaaataaaacagagttccgttttacagtgaggacatcttagccctggctaaattcattttcaattattattaaaacatcgtttcaattttaaggctgttaaatgttaaaaatgcaaaacagatcacgaagcggtgattgataaaccgtgaaatccctatttaattcaataaaatacaatgaattattcaaactttaaaaaaagacggcggatcgaaaaaaaacggcaggaaaacaaagagcgcggggatgccggccgtactgtcagcaaaaaagcgcgatctatagcaagaagttgttgcgaattgcgtccgtcatcacaaataatgaaacgatgttttgataaattaacacccatcttttaaatctacttccactggccggtcaacgcaggcgggcgacatctcaggaaggaaaaggagtacatcatggctaaaggcatgcgggttaaactgaattatgacgtcagccgcgatccggacaccggcgcggagatcacccgcttaaccccaccggaagtgacctgtcatcgtaactatttctatcagaagtgtttttttaacgatggcagccacctgctgtttgccggcgaattcgacggcaactggaactactatctgctggacctcgcaaaggccgaggcggtgcagctaacggaaggcgccggtgataacacgtttggtggtttcctttctccggatgataaatccctttattacgtgaagaacgaccgtacgctgctggaggttaacctcaccacgctgcaagagcgtgaagtgtatcgcgtcgccgatgactgggtgggctacggtacctgggtggccaacagcgattgcaccaaactggttggcatcgagattgccaaaagcgactggacgccgctcaacgactggcagattttccacgatttcttccacaaaggcccccactgccgcctgctgcgcgtcgacctgcaaaccggcgaaagcagcgtgatccacgaagagaggaaatggctgggccatccgatttatcgtccgttcgatgatcataccgtcgccttctgccatgaagggccgcacgacctggtcgatgcgcggatgtggatggtaaatgaagacggtagcaacgtgcgtaaagtcaaagcgcatgcggaaggcgaaagctgcacccacgaattctgggtaccgaacggctccgcgctggtgtacgtctcttatctgaaaggccagcagggccggacgatctacagcttcaacccggataccggcgttaatgaagcggtgatgcagatgccggcctgttcgcatctgatgagtaactttgacggcacgatgctggttggcgatggttccggtaccccggtggacgtcaaagacaccagcggctacaccattgataacgacccgtatctgtacgctttcgatgtcgcgaagcaggcctattttcgcgttgcgcgtcacgatacctcctgggcaaccgtggccaatagtcgccaggttacccacccgcacccgtcctttacgccggacgatagcgccattttgttcagctccgataaagacggcaaacctgccgtgtatatcgcgaagctgccgccccagcctgagatgctgaaggcatagcgttagccactgtttgagttagtgtttctgtaactggccttgccctcctttcggagggcttttttatgcccggcgttttccccggatcgcgctgcgcttatccgggctacattccgtgccgatggggcgcactgcgccgctccgggaagagggattaataccaaaggaaaaccccggctgaccgctccggggtaaacgatgaggacattttttaagttagaacgagtaggcaacacctacgcggaaacgggtctggcggtcgctgcgatcgttgacgccaacgttgccgagctcgccgtacggcgcccagtttttatccagcttgtaggcaaccttgaggttgtactcctgcgagtacggtttgttgtcgttgcgcttaaccccttcggtactgcgcgcataaacgtagttcagctccgtacgccagtcgccgaagacgtaaccggcccacgcatcgccgcggttaactttgtcatcctctttccctgcattcgccgggtagcgggtatagtcgtaacgatagcgggcggcgacgtagaagccattatcgaagctgtactgcacgcgcaggtttggcttgtagatcgagcggctatcgttactttcaatattgaaccccggcgtgaccgagaagtttttattcgccttccactgccaggtaatgctctcttcatgaccattaccgacgaaatctgaataaggctggctggtgttatcgccgcccgacttccacttcgcctcaacggagaagccaaagccgttagcgaaacgatgggagacggagacgcggtcggcgttgctcttatccgatttgccgccgtcaatgaattcgtgacgtaaatctaccgtgacggctgaagccgcgaaagacatgccacagagtgcagcaagggccagagatcttgcgaacataaattacccctcataattaaaatatcgtttcgtttttataaaaccgtattttattttttaggcaataatgttttagtgatcgcgatcgtaaatatttgtttcaaaaaaggtggcacagaaagacgtgacaacgctcaacaaaatagcgcgtcagaaaggaatttttggcagggtaacgcctggcgggaagcaaaaaaaagcctccacagggaggctcagttaacgcatatatcagaaggggcttattcgcgttcaaccgccagcgccacgccctggccgccgccgatgcatagcgtggccagccctttgcgggcatcgcgtttaatcatctcgtgcaccagggaaaccagaatgcggcagccggaagcgccaatcgggtggcccagcgcaatggcgccgccgttcacgttcacccgccgctcgtcccattccagtaccctgcccaccgaaatggcctgagcggcaaaggcttcgttggcttcgataagatcgacttcatccagcttccagcccgcgcgttcaaggcagcgacgggtggcatggaccggcgcgatccccatcagcgccggatcgacccccacgctggcaaaagcgcggatccgcgccagaatcggcagccccagctcctcggctttagcttcgctcatcatcatcaccgccgccgcgccatcgttaatgcttgaggcattgccggcggtgaccgagccctgctggtcaaaggtcggcagcaggctggccagcgcttctgcgctggggtcgacgcgcggctgctcatcggtatccaccaggcgcggagtaccgttgagttcgctggtcaccggcacgatttcatcgcgaaagcgtccggaatcaatcgcccgccgcgctttgtgctgcgagctaagcgcccacgcatcctgcagttcacggctgatgccatactcgcgcgccaggttctccgccgtcacgcccatatggtagtcgttaaacgcatcccacaggccatcgtggacaaggctgtcgataagctggctattgcccaactgggcgccggtacggctgtcggtcagcacgtgaggggcgcggctcatattctcctgcccgccggcgatcactacgtccgcttcgccgcactgaatcgcctgggtcgccaggtgcagcgccttcagtccggaaccgcagacgtcgttgatggtaatagcagaaacggtattaggcagcccgccgcggatcgccgactgacgcgccggattctgtccggttcctgccgtcagcacctggccgaggatcacctcatcaatactttgcggatcgacgccgctgcgctcaacaagcgccttcaccaccacactgcccagctccaccgccgaatgacgcgacagcgcgccctgaaaacagccgattggcgttcgcaacgcgccgacgattacgacatctttcatcctctacctctgctccgcctctgcgcaaagaaacagcatcatagtagtgaattgttatcaaaaattttcgcaattgtttaaaaaaagtgaggggaatcacaaagatcgtcggcgatggcaaaaatggcccctattcgcgcccgtgcccctgcagatgctgacgcagccagcttcccgcttctcccggcggcgcctttttattccacagcaaatcggtggagatcatccgcggccagccggcaatatccagcgccaccaggcttccgctcccggcgaactcctccaccagcgcgctgggcaaaatacaccatcccaacccctgcgccgccatgctgaacagcagcagatagttaggcgccgaccataccagaccgcgcgccggttccgccgtattttccagataggtgctcaggcgcagctcgcgccagctgaacagctcatcgcgggtgacgctgccctgggccgccagcgggtgccggggcgccacgaagatagccatttcggtttgcatcggcagccggatactgcctatctctgtcgggtagctgtccctggcctcaatcagccccacctgcgcccgctccttttgcagcagatcgataacgtcgtcgtcttcgccaatcagacactcaaattcggtgtgcggaaaacgacgatcgaactgcgccagcagatcttccagcacatcgggatgcagcgtatcggagagcacaaaggtcagacgcgcttcggtgttgccagacagcgaaatggccagctcatccagcctgtcgctggccgccagaatcgccttcacgtagctcaacacctgttcgccctgcggcgtgagcgtcggctgtctggaggtgcgatcgaacaacgtcacgccaagatcggcttccaggttggcgattgcggtgctgatggtggactggcttttgcgcagccgccgcgccgcggctgagaatgaaccgcaggccacggattcgacaaacgcggttaaagcttcgggagaatagcgcatgaactatctactttatcgatggatactatcttttgtttatcacatttatccataaaatgccgggtaatttcatataaagaccggaggcaacaagccatgcaacaagtcaacgcccagcgcaaaacgctgacggaacgggtaatccacgcgataagctttgaaggtctggcgacgctgatcctcgccccaaccgccgcatggctcatgcagcgttcggtcgttgaaatgggcgggctcagcatcctgctcgcgaccctggcgatggtctggaacattatctataacgccctcttcgaccggctgtggccggtaacccgggtcgtccgtaccctgcgggtccgcgcgctgcacgcgatcggcttcgagtcaggctttattattatcggcgtcacgatggtcgcgctggtgctgggcgtttcgctgatgcaggcgtttatgctggaaatcggctttatgctgttcttcctgccctacaccatggcctttaactgggtctgggatatgctgcgcgagcgggtcatcaaggttcgccagcagcggatcgccgcccgccagtaatctttagcaaagcgcccggccggtaacgggcgctccgccgcttcatttcttcgccagaaactatcgccacagctcatccataaatgtgctaaattgcactcctttttgttcgttttctggttgataaagtcgcataatgtctaaaatttggtctaaagaagaaactctctggagtttcgccttatatggcactgctgtaggcgctggcacgttattcttgccgatccaactgggatccgcgggcgctatcgttctgttcatcaccgcgctggtcgcctggccgttaacctactggccgcataaagcgctgagccagtttattctctccgccaacatcgccccgggcgcagggatcaccggcgccgttaatcactattacggtaaaaagatcggtagcctgattaccggcctctatttcctcgcctttttcgtggtggtgctgatctacgccgtcgccattacgaactcgctcgcggagcagctctccagacatgtgcccatcacttctcaggtcagggcgctgctcagcctgggcgtggtgctggtgctgaatctgatctttttaatgggccgccacgtcacgattaaagtcatgggctttttagtcttcccgctgatcgcctgtttcctgttcctctccatctatttaatggggagctggcagccggcttatctgaccagccagatgcagctgaccccgcacacgttccaccaaatctggatctcgattcccgtgatggttttcgcttttagccatacgccgatcatatcgacttttgctatcgatcagcaggagaaatacggcgagcaggccatgggtaaatgcaaaaaaatcatgaaggtggcctacaccctcatctgcgccagcgtgctgtttttcgtcttcagctgcctgctgtcgataccggcgggctatattgaaaccgcccgccatcaaggggtcactattctttccgccctgtcgatgatgccggggtcgccggcgtggctggcgatcaccgggattattgtggcggtggtggcgatgtcgaaatcgttccttggcacctattttggcgtgattgaaggggccagtgaaatcgtcaaaacgtccctcgcccaggcggggattcgtaaaagccgcgcgtttaaccgggcgatgtcgatcctgctggtttcgacgctgaccttcgtggtgtgctttatcaatcccaacgctatctcaatgatttacgccgtcagcggcccgcttatcgcgatgatcctgttcatcatgccaaccctctcgacgtatcttattccggcgctgaagccctaccgctcggtaggtagctttattaccctggttgtcggtttgctctgcgtgtcggtgatgttttttagctaatcctcttcgtgcggcgagtcttttcctcgccgcacgttctgccaacattctccccccaccaatctccctgacggacatacacttatcccttgcacacctagaaagcaggggtttatatgtccagcgtaaaattatccggtactgcgacgttaggcgatcgtcaggtttatcgcctgggatacggggcgatgcagcttgcggggcccggcgttttcggcccgccaaaagatccgcaaaccgctatccgcgtactgcaggaagcggtcgagtcgggcgtcaatcatattgatacctccgatttttacggtccacacgtgactaatcagctcattcgccaggcgctgcatccctattccgccgatctgtgtatcgtgaccaaagtcagcgctcgccgcgacgataaaggcaactggctgcccgcgatgtcgcccgcggagctcactgcggcggtggaggacaatctgcgcaatctgggcctcgacgtgcttgaggtggtgaacctgcgcagtatgctcggcacgcatggcccggttgaaggttcgctggaggggcccttaaccacccttctggagctgaaagaacgcgggttgattcgccatatcgggctgagtaacgtcaccgccagacaggtgagcgatgcgcaaaaactgacgccaatcgtctgcgttcagaaccaatataacgtggcgaaccgtcaggatgatccgctgatcgacgagctggcggcgcaaaatatcgcctgggtgccctttttccccctcggcggttttaccccgcttcaggcccgggagcttaacgacgtcgccgcttcgcttgacgccacgccgatgcaggtggcgctggcctggctgctccagcgctcgccgaatatcctgctcattccgggcacctcctcgctacagcatctgcacgagaatctggccgccgcgcaattaacgcttccaccagaagcgttagccattctggataatctccagccccactcctgatttcaggcttctgcggatcgatattcgcagaagccttctcctcaatatttgcctggaattaccttaacgccactggcactatacatcctacaaattaggcgttatccgctttattctcttacggataaccctatgcaaagcatagatttaaactttttcgactggcctcctaattggaggcttctgtcgtttttgtctcgccaaaattttcgaactcttgattacaggaaaaacaatatctcattcaaagtttatacaaatcaatttagctgcaaagatagctaacaacatcaaatgctcataaaaacatctggttaacacaatcagaatgtttgtattgctatataaaaaatcgaccacacacaataacaatttacaaggatttcacatgacagagggaacgataaagacgagtaagtatgaaattattgctattttcagggaagagctccgaaagcaggcggagatagaagtttttgttaataacaaaagcactattacccagctaacgcgggtagattttgccgagtttcatatctccaccaccagcaaaatccccgcggggcataaagttaaatttattctgcatagcgattcagggaaaatcgagttttgctctacgctaaagaaaagctatgccggcggtgaagggaaatgcaggaaggtcgcatttaccttaccggagtgtatccaggtggtacaacgccggcgcgatccccgattccgtctgcgccacgagcacgaattcttctgtcacggccgacacaaaaacggagaaaactatctattcgaaatcaaagacatttcggacggcggttgcgcgctgatgaccaggagccccaatctgaaattcctcagccataacgccatcctcaagaacgctatcctcgccctcgctgaatatggcgaaatcaccgtagatttagttataaaaaatgttgttatggtgactttagatgataacgagaagtcagatagctactaccagatttcctgtcagtttaaatttcgccatcttgataacaagaagcgaatagagaaagtactgctcgacttgattatggaagccaagagaaaaaagagagtctgaaccattggacagtatattactttacactgatgacaatatcatcgggcaatcaatccatgattatatgattgatcgcgccagggatatcaccaccctgaaatttcaggatattgtgaaaggggtcagcgcctccccggcagccaccgttattatcaatatcatccacaaagatatctctgcggccacaacggtcgcattactgaacactttgcgcaagcgcctgacgcattgcgcgctgctggtgctgatcgtcaaaagcgagctgtccagcctgttccgggagctgcttgatctggaaaacctgttgattctgaccgaaaaatcctcgctggcagattactcagccatcatcagcaggccctcaaccgccgagggctgccaggggctatgcacccgccgcaagctgaccgccagggaacttcaggtgctggagttaattattgcctgcaataacagtaaaaggattgcggtgcttctcgacattgatcataaaacggtccacagccataaggtacatattatgaagaaactcgggatgaataactcgcgaacaatgaacaaaagcatagtcaatatgtaccagtgctaaaaccaaaaatatgtgggtgaccaatcaaaacccgataatttattggcgataagccattaataatcattcccatcggtagaaaggtcacctataatattctcctctctttacctctgacctgatttttgacgagagataatgaacgcaactcttttttccaggcataatttatcacgtagcgatatatccgttcgttatgtctttcaaaaaatgttttccccaaaaggtacgctcgtcgccgttgagtgcctgagccgctttgaccgcctgtctatatcgccggaaaacttctttcgctacgccaatacgggactacgcgaaagcatttttatggaacagctggcgcttattgaaaaacataaacagtagtttaagcaaaatgctatctcggcgacgattaatgttgatgaccatatacttaacgtattgcaacgcccggagattaaagcgctcgtcgaccaaatcggctgcgtccattttgaagtgaccgagaattcccataatcttttgaataatgctctcgcaacctggaataacccgcaaagcactacgctctggctcgatgattttggctctggcaacgccggtattcacgctattcgcgactatcatttcgattatgtcaaaatcgataaagacttcttctggcttttaatgcaaaaagattccggtcgtccgttaatggatgccctcgtcactttcctttcccgcaaccaccataatgtgattattgaaggtgtagaaagcgaagcgcataaggcctggttgcagggcatggaatggtttgctattcagggacactactggaaggaagtgagcattgaacaattggtccaggaagatatcaccgcataaataaatgccggataactccggcatcaaaagtcatactcgcgcaataccctctccccttcaattataaacgagctcccatgttgcccaactggtcaacgggccgctggttgctttttccggcgcgggggtcacgtagccgatgtaataggtaaatacgccgccatcgaccgctttttcgaccagcggcacccggttttgcaaggggtcggccgggacgattttattacttttatcgagggtattattatcattggtcgacagcgcgaggaaaatatggctggcgccgtccgcccgcgtattcctcagatagccggcattttcattgcccaccgcattgaccgtaaagccgtcaacccagcggacgttaaccaggcggatctcgtctttatccgccgcgccgccgtcgtgacgcagctggcagttcgagagttccagcgtaaaaggctgcggcttcataaatgccccggcaccgcgatcgtgtacttcggccaggctgaccggcgccagccagacgctgccgctccccgcgttgttgccgccgttcagcgccacgctacaggagatatccgtcacccgtccggcaaaatccacccgccctcgatcgtagttggtctcaaaacccgacgccggggaggccatcagcatcccgccgatcagcgccagctgaatgagtcgtttgctatttttatattgtgctgaatcacgcatacccgcctcccgaattaatcgtacgtcaggttaaagatcatgtgcgactccacctcaccggtactggtggtcggcgcatattgatagaaacgcgcatgcagaggcagggtgatgtatcgggtttcttgcgtgcgcagcgtaccgacgctgtatttcttgttgaattccagcggtacgccctctttcaggacctggataccaattcctttcgccaacgaggagccggatttttcgttcagcagcgcgcctcggctcaccgtggtgccggtggccagcgtgccggagaaagaggtctggatattggcgtatcccgactcgcttaacccgccgctgcactgcagctcaatattaaaatcctttccgcccgcggtggtgccgacgccgttgagatcgctgcgcttgatggtgccgacatcgacgttcatatttttgccgctcaggatggtacatgagggcgataccacggtgatggcgttggcgctcaggcgggtttcgaggatcgggttattgccgttctcccagtcgtaagaggtgtacttacctgccgccagggttccgctgccggtcacgctcgcggttttaatcacctccagcgtaaagcgggagccttccagcgagtaattcgtggtccggctgacgtagctggagaacgtgtcagggtagataatattgaccgtcgccccgccgcggctgaaccgcaggccgatcccgggcacgttggtggaataaattttatttcccagatcggtcgccccgggggcgacgattttggccacaaagcggttagtgccgctgctgcagctatagctggccccgcccggcgccgacatggtccagtcccgggacacgatcaccgagcctaccggcagatccggcggaaccaccacccggcccacaaccatgtcgaggctaaccgtcggctgcgacaggcgcgtacagtacgcccatgccgacgtggtccccatcgccattaagccaataaaaagcgtcagttttttcattagcgacatagcgtttcctttgttttttcctgacttaattccaccgagcactgtccgccgctccacttaaccgtggccttcggcgcgctggcgtcgctgataaacatcatgctgccctggcccaccacgccgatctctttcccggaggggttgtaaatcgtggcggcgaacggtagcggcagaccgtttgcctgacgcgcctgcagagtgacgttgttctgcagcgtggtatcgaaggagaccttgaccacgctcccttcccacggcaccacctgcgccacggtactgccgaaggcgacatcgtcgttgctgcctttcgggtcaatttcaacggaatttatccggtaaggccgcagatacggcagaatggcgtagccgtcgctgtcgatgcgggtacccggcgagccgggcaacatcgcgcccgcggcgtctttcgcttcgatcagcgccatggtggtgccgctttccggcgagaatacgacgccgtgctgatgcgcgatcagcgtcccgctggcgcctacgccgctctggcgatagccttcgccctggctatagctgccgttcagcgtggtccacggggtacggtagctgccgttcagcgccacatcgtgctggccgccggtagaggtcgtggtcgacacgccgtagttgaggttgttttcactatccagcgaaccgttgacgccaatctgcgaactggcgaagcgtgagttattaaacgcggtattcgacgtcaggttagccgtacggttttcaccgaaccacagcgggtagctaaagttgagtgacacgcgatcgtcgcgacggtggccggagctatccggggtatagacgcgctgggcgctgaccgaccacgagagccgaccgtacatgttgttgtaactaaactggtactgcttctccgttcccgaacggttccagtaatccgccacccggccgctcaggtaaaaaccgccccagccgtccggcaggttctggttgacggtaaaggtcatcccgtttttctggcgccacacggtgtagttgctgttgtagttcttctcccgatcgacggcgtagagggcgtcgttcaggttgtagtagcctttggtggagtagcgatacgccgccagcacgatgctggtctgggtttcggtaaacatgcggttaaaggtggcgcgatagctttgaccgtgctcgtcaagggtatcgctcttcagccgcgagtgagtcacgtcgaatgagagcgcgccgatgccggtattcatcccggtccccagcaggaacgcctgatagtcatcaaatccggtgacgccggtatagccggtaaacaggttatttaaaccatgctgccaggttccctggtagagcatcggtttattacgcagcgaactatcgtcgactttaccggcggagagcgcgtagcgggtcatccccggacgcagcagctgcgctaccgaggcgtaaggtacgctgaatacctcgaccgaaccatcggcctctttaaccgacacttcaaggtcgctaccgtagccggaaggatagacatcctgcagggtaaacggccccggcggcaccgtggtctggtagataatattgctgccctggcgcaccgtcaccagggcgttgctttgcgccacgccgcgaatttcaggggcgtaggagcgcatgccgtcggggaacatattgtcatcggtcgccaggttaaccccgcgcaggccgatggtgtcaaagaactcgccgttggtaaaaatctgcccgccgctgactatcgagttaatctgcggaatcggccgctgcaggtaggtctggttgctgttccagtgcgctttcccctgctgctgctgccagttcaggttaccgatatgcttgagcagccagccgtcccacgacaggcccgcgttaacgccaagatacgcgctgctgttatcggaaccgttggccgaggagatatggctgttccaggcgttggccatccagcctaaattcagcgccgcaacgcctttatcccagaactgcgggctgacaaagtttttcaggcgctgatcttcgtagatttgcggtacggcaatatccagtctcagggaggactgaatcagcgtgtctttgacgttatcttcgtgacgccactcctgcaggcgtccgcagaagccctctttttcgctgagctgcggatttaatttttccggcgaaatcccatactgcatcagcatcgctttggtatagcagacgcccattttgccgtctttaccggcggtgattttcaggtcgtagcgccctttccattcgccgttagtatagacatcaagggagtagacgccctcgctgatagcgctggtcgagaagcgcgacaggtcgaccttttcgcgactgccgacgataaaaccatcgttaaattgatagatcgttcccgggttttcctgtccgctggaaaatggcggaaagcagcacagcgcaaccgcaatagccgtgcttaatcttcccgggcagattgacctctgcttcatgatcgtttcccttatttgacggtaactttcactgcgacatctgcaccataatcattaatgttgttaacggtcagggtctcgcctttgctcaccgctgaagagagggcgatggtctggctggactgcggggcaaacatgaccgttttgctgttgagcgctttgccgccgttacgggagatacggcttacggtgatataaaagggcgttgggttactgacggacaggctgctgccgttagcggagagcgccagtttttctgccgcagcgtcgcgattgcctagcccggcagggcgataaataaacttaaagcgcgaacgaatcgccagctgcagaatattttgcccttcgtttttctggctggcctcaaccggcggtatttccagaaggttcagccaccacagcgtctctttatctttagccagccctgcattactgccgagcttaatacgcagggtttgaccgcttttcgcatcaacgcgggaaataggcggcgtgataataaagggggtcgtaatggtatccggcgtcgcgtcggcattaccgttatccagccaggcttgcgccagcgccggacggtcggcggtgttagagagctgcaccgttatttctttttcatttcctggataaataaagcgggtaccgttaacaataatattattggcatgggccgcaaaactaaaaatgaaacagaaaaaaagggcaatacgcttcatgctgacctcagaataaaaaaataagcgacagcagtggccgctttattattgttgtataccctgaataattcgaattgcagaaaggcggccagagagtgactggggtgagcaaacgtcgccaacgcctgtgccattcgaagtatgacgggtatagaccgccccggcgcgaggcggctttatctctcagtcgatattactgataagtaatttcgtaagtcgcgtagctgttaaccacaccggtggtaaccgtggtcggggtgctggtcgcgtagccgacgtagtaagtgaagcgcgcgccatcctgaacggcagaggcatcaccggccgctttaggctgggtgctgtcgcccgggatgattttgttggtcagcgcggtggcgttatcggtggagagaaccagctggatattctgcgcgccggcggcttcggtgttagccaggtagccctgctgtttagcggttgcgcccgccagcaggttaccgccggtccagttcacgcccagtttgctcacatcatcctgtttggtgccatcagccgcctggcagtcagaaacatcgatggtgaaagatttcggtttcagataggtatccgccgcggcagctttaacttccgttaaagtcactggtgacagataaacgttcgcatcgctgccctggccgtttacggaaacagtacaagatacgtcggtaactttaccgaagaaattaacctgaccgccgcctacattggtatcagcagcatttgccgcagccataccaaaaaacgcagttgccattgcagcagagagaagaacctttttcattgccatttccttgtcagagtgaattaagtatcaatgagcaaacagttaatacgcacaaaagtcagaagcgatttgcgatgctcacttttgcaactgttaatagaaacttcgactgaccggaagccgcaatatttaaggcgtcaggaacgaacccgataaaagaattcgtcaaggctgtcggcgtcaaagaatgctatttttcgctgacaaatatacatatgttcacgagctgttaatcaatgtaacagatagctcacaactattaattactggggattgatagcaagaaacaaagctattgttatttacactgaaggggaaaagacgatatggaattaacaagatagcaacctatagttgcataaaaggttatttctctacagagagaacaatcctaatccgtcagcagtctccctttttcgtcagttgaaaatgcagatacaacgcgcgccaccctgccggcgtaatcgtcacttcgcgaaatcccgcggtagtgctaaaccagccgttctccagaccgtgctgcagcagcgccgcgcccgccgcgcccccaagatgaaagcgtcgttcgctccagtccagacagccgcagcaggctttgcgccgggagccgcgcttcaccaccactcccagccgcgcaaagtgcgcttccccggcgagcgtcagcgccgttccgtcaggcgttatccacgcttcacgctgcagaaaatcatacagcgataccgccacttctccggccagatgatcgtaacaggtgcgcgccaggcgcaaattgaccggcgtgctggttgcgagcgccaccgcgcgcttgccggccatggtcatcatattctccagcaaaccggcgacatcactaccggcgaggcggtagtagcgatgccggccctgggcaaggcagattaataaaccgctgttgaccaggcggctaagatgcgcgctggcggtcgaaggggaaatatcggcgacggcagaaagctcggtcgccgtccacgcccggccgtccattaaggcgcacagtatcttcaggcgcgaggcatccgccatcgccgacgccactgccgccatcgcttcggccagggactcatcgtcttcaattagctcaacaggttttaacatagtgcctcgcttattttccctaaccacaaacagcagccagagtaccggggatgggcaggttaagcacgatattcgcgcagcacctgagctacccgaatgtgataacaagcgaaaatgctctcccgcccctctttctgcgcagcctgatggcaaaggttgcgtttccacgcctgcaccgcttcctcatcccgccaccaggagagcgacaaaattttccccggtgtggtcaggctttggaaacgctcaatggcaataaaaccgtcaatattgttcagcagcggcttcagctccgccgccagcgctaagtatcgttcctgactcgccggagtgacctcggcttcaaagagtacggcaatcatcccattgtcctcacgcaatctgtgtgagggtcactgtatcttttcaccctggctcaatgcttcgttgacgggcgaaatatcgccgctttacttgctcaaaaaacagccaatgcattcacattaaaaataattaatcacgcgaggcgagaaaactgcgcggctgttgagatcgttttccacggcgaaagagacgctgcagaataaatcatctgtttgtttttattagaaataaaaattaaaatttaggcattcgtcatcataccgtcacaaaagtgtgatctaaatcgcactttttgcaactcgcgttatagttagcaggcttattataagtccatcgaaagcaacaacgctttccaccataaaagttaaaaggacaaacaccatgaaaaacgtaaaattacttgccgctgccggtatgctgtctctggtctctttcgctagcttcgctcagcctgttagcgtaaccgctgatacgctggacaacgccgaagccaaaatcgccgccattgctaaagaccagggccagtcttatcacattaccgaagcgtataccggtaaccaggttcatatgaccgccgagctgtctaaataaccgaatggttgcagagggagctgccggacaggtcgcctgacggcggctggtctggctcccgccacataataagcacacagcaatgtcgagccccttgatggggctttttttgtttctggcgaaccgtgaacccactgcccgggctacgggttcactgccgtctgcggtgccgtagcccggacagatgcgcagcatcgcctccgggaaattcagccactctgcgcgctgctcccgggggcggcgcttaatgcgccttgcccgggctacaggttaacagccgtctgcgggccggtagcaccgacagatgcgtcagcatcgcctccgggaaattcagccactctgcgcgctgctcccgggggcggcgcttaacgcgccttgcccgggctacaggttaacagccgtctgcgatccggtagcccggacagatgcgccagcatagcctccgggatgttatcggcccgctacggcgctcttattcgataacgcacgctgaatcgacagcacgctgaacagcacaatcaccagccccaccagcgccagcccctcgatcttttgcccgaggaaaacccagcctaatagcaccgccgtcaccggactcagcaggctcatcgccgacaccgccaccggggaaaggcggctgataccgcgaaaccacaggccgtatgccagcatcgccccggcaacgcacagccacagatagcccgccgcctgagtcagcgtcacctgatgcagaggcggatcgaccagtaacgcaatcggtgccagtacgataccgccaaccagcagctgccagccggtcagcgcgataaccggcaaagcgatcgcccagcgacgcgacagccaggttcccagcgccatgctcatcgcccccagaaacgccgcggcgatccccagcggttcgagcgtggtttgcggcgacagcagcagcatcgccattcccgcgatccccatcaatgccgagagcaccgccagccagggcgatcgctgacgatcgacgcaccaggtcaacagcatcaccagcagcggctggatagcgccaatcaccgccgccaggccgcccggcagccgataggcggcaataaacagcagcgcctgaaacgcgccgatattcaggatcccggtaacgatcagcttccaccactcggcgcgcagcgggaaacggcgactccagatcaacagagcgatcccggccggcagcacccgcagcagcgcggcgataaacggacgatccggcggcagaaactgcgaggtcacaatataggtgctaccccagatggcgggggccagcgcggttaaaaacagatcaaccatcaaattgcgcgaaacaaaggccatgattttatcttcacatcaaggtaaattgtggcctaagtatgtatcgatatttatcttgatatcaagacaagtgagcattaatggacaaatcaccgcagaccgacgccgtggatcgcattcttgaacagtggaaacgggaacgccccgatctcgattgcagtccgatggggccatttggccgcctgaaacgctgcgcgctgctgctggagccgcgcattgaagcggcttttcttcgtcatgatttagtgcgctgggagtttgatatgctggcgactttgcggcgggcgggcgagccgttcgtgctgtcgcccacccagctcttttcaacgttaatgatcacctccggcaccatgacccatcgtctgaaggctctggaaaaacgggggtttattcgccgtctgccaaacccggacgatgcgcgcagcatgctggtcgcgctgacgccagaggggcgagagttaatcgacagggcggtggaaagtcacgtggcgaatgagcgggagctgctaagtgggctctccgcggcgcagcgccagcagctcgatgaagcgctgacggtttttatgcgcctgctggaaaaagagtaatacccacccgctttgaataaggcgcttaccttgttgctggatggcggttgacgaagcaccaccgttatttcccggaggcgatgcttgcgcatctgtccgggctaccggcccgcagacggcggtgaacccgtagccccggtaaggcgcgtcaagcgccgcccccgggagccgggcgcagagtagctgaatttcccggaggcgatgccgcgcatctgttcgtgctaccggcccgcagacggcggtgaacccgtagccccggtaaggcgttagccgcgaccggggagctgagcgcagagtggcataatcaccccttaccgagcggaaacgggcgatcctgcacaaccgttttcatcaccagcgtcgaccgcaggtgctgcacgccgggcattgccgagagtttgtcatcatacagcttctggaacgccgggagatcgcgggttaccacgtgcatcaggtagtccggatcgccaaacaggcgctgcgccagcacgatttgcggtatctcttccaccgcctcctcaaacgcgcttaccgctttcttatcgccctcttttagcgtcgcgaagacgatcgccaaaaagttaaagcccattttggccggatccagattggcccgatagccggtaatcacgccttcctgctccagcgtccgcagccgtcgatgacagggcgaaaggctaagattcacccgctcggccagctcggttatcgacagccgcccgtcagcctgtagctcagcaagaatttttcgatcgatgctatccatttagaagattttccctcagaagaacgccttaaagcataacattaaaagctcattgcgcaataaactcgatattctttccctcaaacaaccgccgcttaacgagggaaaatgatggaaaattgttgtcagcacgcagaggcgggccgtccatggaaatgagctttatcgccagcttttggctggtctcctttctgctgatcatcacgccgggcgctgactgggcctataccatcagcgcggggatcaacggacggcgcgtgatacccgccgtcgccgggctcatgtctggccacctgctggccacgctgatcgtcgtcgccggaatcggcgtgttaatcgccaatcatccgctggcgctgtcgacgctcacgctgctgggcgcaggctatctgatgtggctggggatcgctattttgcgccatccgccaacgccaggtgcacagcagcacagcgcgggcagctggaatcgctgggcgattaaggggttatgcattagcggcctgaatccaaaagtctttcttctgtttctggccctgctgccgcagtttaccgacccacggggaagctggtcgctagcccagcagatgtcggcgctaggcggtattcatctggtaacctgcacgctggtctatttacttgtcggctacggcgccaaagcgctgttagcgacccggccccaaatcgcgcaaaaggtcagcatcgcttccggggtgataatggtcgccatagccgccctgctgtttctggagcagctgaggtagggggcggggaacgttcgcaatttaacggctatccgttcaggcagcgactcagtggcattaaattcaccgttgccttattaaacgtggttgcgccagcatgctggcgcatttattcaggcgcgaatatcgtcgtactcgcgagtattatcaaattcatgtttggcaaacgggcacagcggaataattttacgctgctcaccgcgcattttttccaccactttcgccaccagcttttttcccaccccctggcctttcaggctggggtcgacgtcggtgtgttcaataatgctgaggtgctcgcccgtgggcacaaaaacaatttccgccacctgcttcccgtcggcgtcattgacgtaaaacttgttatgaccttccagtatttccatcatttcctcgcttatttttggcgatactttagtgcgccgctcgggcaggtatcaataaccttaaccaccgtggccacgtccacttcatccgggacgatccacggtttgcgtttcaggttgaaaagcttcgcgctaccgcgcacgcagttacccgagtgctgacagatatcggtgttaaagtagacgtcgattttctcgccggtataggcgcgatagcccgcttccagtagttctttatccatgacattgcctcagtcctgactattttttagctttggctctaagcatagccctgccaacaaccgctgactatcggcgacgggcgaaatttatattccagcggcctcacgccattaatgcagaatgaatgattttctatgcactcgttatccaaagaaaatgttctgtttatcgatgaaatacagacgcttcggttatatctatcttttatttccccggtagggagattacactcatttcaccttaacccgagcactcaggtattcagtcttgaatcgcattgtaaagctgccgcgccctacgctcttattcttgctatttacgctctccggctgctcattatccccggcgattccggtattaggcgccgcattcccgggctggtttttctgcttaacaggcgccgcgctgttacttattccctgccatatcctgattgtgcgtaaaggatggcagtcgcgattttctccgctggtcttcagctatctggcgctgatgttcctgttcgccacgattctgtggttcctgctcttcgtaaactagatacctatgacctcatcccgctcaagcgttatccgcaaaaaatggcccctgctggcgctcgttctcgccgctatcgtggcgctgattctggttatctggcagctgcaaacctcgccggaaaccaacgatgcctatgtctatgccgacaccatcgacgtggtgccggaagtgagcgggcggatagtcgagatgccgattcgcgacaatcagcgggtaaaaaaaggcgacctgctgttccgcatcgacccgcgcccctaccaggcgatgcttgatgatgccaaagcgcggctgaccacgcttgatgcgcagattatgctgacccagcgcacgattaaagcgcaggaatataacgcgcagtcggtcagcgccgccgttgaacgggctaaggcgctggttaagcagaccacctcttcacgcattcgccttgagccgctggtaccgcaagggtttgcctcccaggaggatcttgatcaggcgcgaacggcagaaaaagcggcgcgcgccgagctggaagccaccctgctgcaggccaaacaggcttccgccgccgtgaccggcgtcgatgccatggtggcgcagcgggcgggcatcctcgcgcaaattgcgctggccgagctgcacctcgaatttaccgaagtccgcgcgccgtttaacggcgtggtggtggcgctgaaaaccacgatcggccagtacgcctcggccctgaagccggtctttaccctgcttgatgacgaccactggtacgtggtggcgaacttccgcgaaaccgatttaaaaaacgtgcggcccggcgttccggccagaatcaccgtgatgaccaaccacagtcgcgccttcgagggcgtagtcgactcggtcggcaccggcgttctgcccgacggcggcagcgtgattgaaggcctgccggtgatccagaagagtatcaactgggtccacgtctcccagcgcttcccggtcaaaatcgccgttaaagaccccgacccgaacctgtttcgtatgggcgcctccgccagcgccgttctgcagccgcaataaggagacggcatgcagagcttgtggccctttctgacccgggaactccgcgatgcgccggggcgggcgaactacaccctgcgcctgacgctcagctgcgcggtgctgattgtgctgtttatgacgctgcatattcccttcctcgccgtcgcgctgatcgtggtgttttacgtcagccagccgaacgtcctgatgatcaaactggtaagcgtggttttcgtggtgaccgtcagcgtcgcgctgggcggcgtgctgctgattatcaaatggacctatgactatccgctgatccgcctggtcgcctcggtgatcctgttcttctgcgccatttacctgatgcgggtgctcggcaagctcgggctggcgtttttcgtggtggcgctggcggtcatctacgcccagaccttcccgtcgatgaccagccagagcgaaattctggtgcgcctgctgctgtggctatgggtggcgatcaacaccgcgattctggtgaccctgctggtcaacgcctgtttccagcaggcctttcccggctatcagtttaaagcccggctggtggtgatgctccgccagacggcgcggcgcctgagccagccggacgatggcacgccgccgcccaccgttaccgagattgccgggcagtttaaccaactgcggtccctgtatcagcaggccgcacgcgccacgccggagattgccgccagcccgcaggcctggcagtcgctgatggccgccgcgctgagctgctctcatttgacggcgctgctcctgccgggcgacgaccatcccgatgcgcgtcggcggatagccagccagcttaacgcgctggcggataatctgcccgcggcggcggaggtccagccgctgattgtcccgcgcgacggcgccaacagcgccattttgcaggagatcgccgaggttctggcgcggctggcgcgcggcgaaaccatcccgctgccgcagggcgaagtggaaaaagcgccgctgcttttgccggacgcgtggtccaatccggcctatctgcactttgccctgaaaacgctgctggcgacgctgctgtgctacgttttttacaccgccgccgactggcagggcatccacaccatcatgctgagctgcgtgatcgtcgcccagccgggcctgggcgccaccatgcagaaaacgtggctacgcatcggcggcgcgctgctggccacgctgattgcgctgcttctgatcgtctttgtgcagccctggaccgattcgctgagcggcctgctggcgatgaccctgccggtcttcgcgctggcggcgtggattgcggcgggatcggagcgcatcgcctacgccggcattcagataggctttaccttcgcgctggcgttcctgagctggtttggtccgctcagcaaccttaccgagctgcgcgaccgggttatcggcatcctgctcggcgtgctggtttcctccattgttcatctctatttatggcccgatagcgaagcgccgcagctgaaagcgcgtctggcccagctgtatcgccagctggcgcaaaccctcgccgcccgcgacgatgaagttcagcaggtaccgctgtttgccgcgctgaccgagagcgaaaccttaatcaaccgggtggccgccgagccgctgggaacctatgcgcacccgtggccggaagccaaaagctggccggcgcgggcaacctttcgtcaggcagaggagatcctgcgcctcagcgaaggctatcgcctctacgccgcgccggaagatacttttttagcccgctgcgcccggcggcttgaagcctacgccagcgatatcgatgcgcagcaaaataccgttgagcgcgttcaggcgccgcagccggatccggcgaatccgttcggcgcgccgctggtcaatgcgctggccgcgctgcccacgtggccgcttgcgtcttccgttattccgcgacaggcaacccgatcatgacgaaaaccactcctcttccgcgcgtctggcgctccctggcgcttgccttcgccctcacgcaattagccggctgcgcgttaattcaggacgatcctggccaggtaccgctggtcaacccgcagcaggccgagctggcgaaggtgatccacctggcgaacagcggctggccgacggcgcggtggtgggaaagctatcaggatccccagctcaatatgctggttaatcgcgcgctgcagaactctcctactatgcaggcggcgcggctgcgtatttcgcaatcgcagtccacggttgagctggcgcagtcggcaatgggcattcaggccaccgccgtggcggcgcaaaaccgcctgcgggtgaccaataaacagtttacctggccctactccttctccctgccggtggataaaaacggcccctggtacacgctgaatacggtcggcgtcggagcgacgctgaatatcgatttatggggcgccgaccgcgcccgcgtcgccgccgcgattggcgaaaagaatgcccgccaggcggagaccgccggtatcgagctggatctcgccagcagcgtggctcagctctatttcgcgatgcaggcaacttttcagaaaatcgaattactcaaccagctggaggctatcgcccgcctctcggtgcaggcgcacgagcatcgtaccgcgcgcggcgtcgaggatagcgtcgatgtcgccaatgcccaggcggagctgctggcggcgcagcagcaggtgattacggcgcaggggacgctgacgcagtaccgggaaaccctgcgggcgctgatcggcgccgatgcgcatagcatgccggagattcaccccgtggcgctgccgacgctgcaggaaacgctcccggactcgctctcgtttgagctgctggcccgccgcccggacctgcaggcgctgcgcggctacgttagcgcttccatgagccaggtggacgcggcaaaagcggccttttacccgcactttgatatcaaggccttctggggctacaacgcgctgagcgtcggcgatctgtttaagtcctcattccagcagatcaatatactgccggggctctatttaccgctgtttgacggcgggcgcttaaacgccaacctgaaatcgacgcgtacggcgagcaatattttgattaagcagtacaaccaggcggtgctggacgcggtgcgcgacgtggcgattagctcgagccagctgaacgatttgaaccagcaggccgccctgcagcagcagaaagtgacggcggcgatggtgaccacccgcagcgccagcgcgcaccatcagcgcgggctggtcagctactatgcggcgcaggaggcgcgtcgcccggccatcgcgcagcagcttttgctgctggatatccaggcccagcggctcagtaccgatatcaccttgattaaagcgctgggcggcgattatcgcggcccggcgcagagcgagaacgccccatcgcgctagcttaacaggcgccattcgcgcgcctggtttaccgcctggatgcgccccttcacctgcagcttttcatacagctgcttaaggtgccatttgacggtttccgccgaaatgcccagctcgcgcgcgacgcccttgttggaatggccgctggcaatcaaacgcagggtctgctgctcccgttcagtcaggcgcagcgcgggcggctgcggacgcgccgtatcaatcacgatcccggcggcggcgaagcgggacagcaaagcgacgatatcggcggtcagcgcatcatccgccgcgccgcgcttgtgcatctccgccagcagcgcagccatctcttccctcccctccagcaggctgcgccacagcccctgacgcagcgcgcgcgcaagcgccggtcggcagacagccatcgcctgctcccgctcgccggcacgccagagggcaagcgcctgtttgagccgcaaacgcacggcgaacagccactcgccgctggtttcccgcacgccggccagcgtatccaacagccgggcggcggcctgcggttcgccggcggcgataaggagacggctctggctgagcgcgatatatccgccggcagcctccgtctggctaagggtctgcaggcgaagcagcagcgcgtcggcggccagtttgtcgcccgcgtgaagggcaacggcaatccgctccgccagcagcggagcctgcgcccgcagccagccgcgctgggccgccagcccttcggcatgcagtaatagtgattcggcttccgccagtctccccatttcacgggcctgacgggccaggatgatatagccgcggctaaggccgtcgggcggacagaagttgtcgatggtctccagacgcggaaccagcaggctttgcgcctgctcgcccttcccctgctcccaggcgatctcggcgagaatgggcgccagggtagcgccgctgctggcgttctcgccggtatgctgctccgcatagcgcagcgcccccgcggcctgacgttccgcttcggcgagattcccctggcgcaaatagctctgcgccatgacaaaggcccggtagaccgtcacgaacaggttgcggttagcaacgctgacgccggatacccgctgctgcacctccagcgcctgctgcggccgggagtccgccagatggcagtagctgaggatgttgcacaccaggccatcaacccagatatcgccgcagggcacctcgcgcagcagcggttcgacaatagcgatactgcgggcaatattgtcggcaaaggcttcgcagatcgcgcgaacgacccgcagcttcacccacgagctgtgggccagcgccccgccatgcgccgccgattgcgtctcaatggcgtcgagcagctggcgagcgtcgctaaaccggaagcggtgggctaacgcccaggccagattaagctgaagctcgatgcgcgacgggtcgagattggctggcaggtagcgtatccactgcaccagggtatcgatatccccctcctccgccagagactgcgcgcccgcttccgcatccctggccgccgattttccggcggccagcgcatggcgtatcgcctcggcccacagctgctgcgaggcgaaccaggcgctggcgcgatcgtgcagctggcgaatatcaatatccccgccgtggcgcaggcgatgcagcagcgcgtcgcgcatcagcgggtgatagcgaaaccagcggccgctgtcgtccagcgcggaaagaaacagattgtgctgcgctatccacctcagcatctcgccgccgttatggcggccgcagacggcatcgcacagatccggatgcaggcgattaagcacggaggtatgcagcaggaagtcgaatacttcgggcggcagcggcgcgaaaatcacttcatccagatagcgggagattgaccgcgagccggcgccgaggcccatcgccgtagacgcgtccggggagagcgcggccattttcattcccgcgacccacccttgtgtgagcgcgataagccgggggatcgcctgcggatccagccccgacgcgccagcgaaataagcgcgggcttcgctggggttaaagcgcagctccggatcatagacctccagcagctggtcctgcatatgcagacggctcagggctaaaggcgcctgactacggctaccgataagcagatgcagcgccggcggcgcatggtgcagcagccagctcattccctgatgaatcgccgggtcgctgatgcactgatagtcgtcgaggatcaggtacagcgggtgcgggcactgattaagctgattaacgagctcagcaaagaacagggggagctcggccggaagctcaccttgtaacagatgcagaaacgacgggctccacccctgccacagcggccgcagcgcctcctgtagatagcgcataaacagcagcggcgcgttgtcgtcctcttcaaggctcagccaggccagcgcatccccttgtcgaaggcggtgccggtaccactgcgccagcagggtggttttgccaaacccggcgggcgcgcgcagcagggttaaacggcgggagacggcgccgtcgaggcgctgcagcaggcgctcccgcgacagcaggctttccggcgtacggggcggcgtaaagcgcgtggaaataagcggcagcgtcccggtgaaacgtaaaggttcctgatgaacaaacgctgtcagtgaatcatccgccgagggtaaaaaagccataccgcgattactccttaaatccagtccgtacgctcattatcccccccatcaggggggtaggccacgcttattgcgcccgatagagtagtgccattcgccgcagcggctacgacgacatcggccgcgggcctccctggtttattaatcagtacaaggtgagtacagacatggctatcgaaaataaagttgcgctggtgaccggcgccggtcagggcattggtcgcggtatcgcgttgcgtctggctaaagacggcgcgtcgctgatgctggtcgacgtgaacccggaagggattgccgccgtcgccgccgaagtggaagcgctggggcgcaaagcggccaccttcgtcgctaacatcgccgaccgcgcgcaggtgtacgccgccattgatgaagcggaaaaacagctcggcggctttgatattatcgtgaacaacgccgggattgcccaggttcaggcgctggccgatgtgacgcctgaagaagtggaccgcatcatgcgcatcaacgttcagggaaccctgtggggcattcaggcggcggcgaaaaaattcatcgatcgtcagcagaaagggaaaatcatcaacgcctgctctatcgccggtcatgatggtttcgcgctgctgggcgtctattccgccaccaaatttgccgtacgcgccctgacgcaggcagcggcgaaagagtacgccagccgcggcatcacggttaacgcctactgtccggggattgtgggaaccggaatgtggaccgagatcgataagcgcttcgccgacattaccggtgcgccggtgggcgaaacctataaaaaatacgtggaaggtatcgcccttggccgcgccgaaacgccggacgatgtggcaagcctggtctcttatctggcaggcccggactccgattatgttaccggtcagtcgattctgatcgatggcggtattgtttaccgttaagggataaacccggcgcagaacgcgccgggtttttgcgggattacgcgttagccgcgggctcctgcggcttgtcgctgcgggtgttttccagcatccggcgaaccggaacaatcagcaggcacagcaccgcggcgcagatcagcagcgcaatggagcagcgtgcgaacaggtcaggcagcatatccagctgatcggccttcacgtggccgccaatcaggcccgccgccaggttacccagggcgctggcgcagaaccacagccccatcatctggccgcgcattctttccggcgccagcagggtcatggtcgccaggccaatcgggctaaggcacagctcccccagcgtcagcatcagaatactgcccaccagccacatcggcgaaacgcccgcgccgttgttgctcaggacgttttgcgccgccagcatcatcaggccaaagcccgccgccgcgcataaaataccgataacaaacttagtgatgctgctcggacggacgtttttgcgcgccagcgcaggccatgcccagctgaataccggcgccagcaaaataataaacagggcgttgatcgactggaaccacaccgccgggatctcgaaggagccgagcatacggttggtatagtcgttagcgaacaggttaaacgaggtcggtttctgctcaaacgccgaccagaaaaaagcggcggagatgagcaggataaagcataccagcaggcgggcgcgctctttgcggctcagtccggcgaagacgaacaggtagataaaatagagcaccaccgacgccgcaatcacgtagaccagcacgctggcgaccgccaccgggttaatcacgataacgccctgggcaatcaacgcgatgataaccgccacgccgaccgtcagcgccagcagccatgcgccgacgccgtttcgtttcactaccgggctgttccaggtggagtcgaggccgacttcgctgtcgtagcgtttcatcgccggaacggcaaagacgcggaagataatcagcgccaccagcatcccgataccgccgatgccgaagccccagtgccagccgtgagatttaatcagccagccggagatcagcggggcgataaacgaccccatgttgatgcccatatagaacagcgagaagccgccgtcgcggcgcgcatcgcctttcttgtacagcgtaccgaccatcaccgaaatacaggttttgaacaggccggaaccgagcacgataaacatcaggccgataaagaacaggctatcccccatcaccgccgacagcgcgatggagagatggccgagggcgatcagaatcgagccgtaccagaccgccttttgttgcccgagccagttatccgccagccagccgccgggcagcgcggcaagatacatggtcccggcaaagatcccgacaatggccgacgcgttctcgcgcgccagccccatcccgccgtcatagacggtggccgccataaacaggatcagtaatggtcgaataccgtaaaacgagaaccgttcccacatttcggtgaaaaacagcgaaccgagggggtaaggatgaccaaaaaaggtccgagtttcatttttattaacagaggaatgcataacttctcccaaagatgtccgcagcgctttaacgcagcggaaagcgtgttggccttttatacacaaggccaatcattcacatttaatgtgacgtaatttaaccatttgataacctaataatggtcctgtctagtcccttcccccaactttttagatgaaaagtcgacaaacgtctacttttacagatttaaagttggcgagagaggaaatgtgattgacagaggcattcatgacaaaaatgatactttttcatttatttacagtgagttaagaaatcaccctggcaacttcatcccgccagaaaccccgggcgataaaaggggtaaaagcgggaaaaaacagcattaatgggggctttattgagtaatgccgtttaatgacattctcaacgactcaaaccagggggaactcgcggcagggaatattccaacctgcagccggaagaacgatcgaagcgagcatcccggctcattggcccattgacggagaggagatatctacagatagcggatcaaaaagacgataagctcctcaatcagctgtggcttcatgactctaaaaatatacttaaactttttatgcgatatttttacaatgcgccatttcgcttttgatgccgtcagccgcagggtgagcctgactttcagcgacaggctttcttcagatacaataatccgcactttatttcttgcgtagtcatatttgaaactaatatcaaaaaagaaaccatcgtttgccacggtgatttttttggcatcgccaaaagaacccttggtaactttattatcaggatttgcttttagatgtgacaatattgagacatataagcacacgaattttattttaaactcacgccgctgtcgctttattttctccttttccttccttaatctttccaggctatttgtcatcgaactcatttattcttcctgccatatgatttatatcctatataatcaccagcgaggtttttaagacaggatagcatcacgataattctccatgcgaataatcagacaacgcctcagaatgttatttctgtagcgttcggtagtatccgctcattatggcttgcataatgacaatatataaaatatggtttttactgtcataacgcgattctgacataaagattgaaataaaatccactttttatttcattggacatgtttttcagaagtttcgcgttacattttaaatgtgcgggtactaagaattatattagctacgcgcataatgtattgaaaaattttaaaaatgagggaaaccagcgacccgtttgttcgttgacggataagccgatgatccctaatggcatagaggaacgtttgaggggctatacccttcaggggggtatctttcctgtacgccactatcaacgacgctttaatccagcgcgctttaattgcgctatattcgggagaagccgtcactttctccagcgccgggttgatacgcggcgcaataccgagccctttaccgtagtactccggatcggtgcgccgctgccggaacagaacgctagaggtgcgcctcttcatccagggagatcacctgaatgccggcattacgatacgcctgaacgtcatcgggcagacgatcgaccaccacggtatcaatacgatccgcggcggtaaactgggcaagcgaggtattattcagtttgctgtagtcgcagacgataatcacctggctggcgtgttcaaccatgccgcgtttcgtttctgccagcatgatatcggccacgcaggcgccgtgtttcagcgacagcgaattggcgcccataaacgctttatcgacgttcagggtatcaagaatggagcgtccgttgatcgccaccacgcagtggtatcccttcttcacgatcccgcccagcagaatggtttgaatagaggggctggcttccagctcgcgggcgatttggtaatcgttggtgaccaccgtgacgttttgtcggtcgcgaatattgcgcgcgatatgcagggtcgtcgtgccggtatccagcacgataatgtcgccatcctcaaccagcgccgccgcgcgctggccgatccgctctttcgcgctgaggttgacaatttcacgcgcatccgacgcctgttcaaagctcgcccgcgtgcgaagaacggcgccgccgtgggtacgggtcagcagtccctcctcttccagctggcggagatcggcacgaatggtggcgccagatacattaaagacgtcacacatctcagaaacagccactttgcgtttttccctgagaatactgagcaacttctcctgtctttcttctgcaaacattctgcctctctcttatttacggcacgttacgcgcgacgcggcgctggcttaccgttgcttatcagtcgggtcctgcgctcagggcatccagcctgtcgtataaggcggcggattgccggtagagcgtatcaaaaagctcgctgcaggcgtggtaataatcccgcagacggggatccggcgaaatcagcttatcgaactgcaccgtctgcctcacgccgctggcaaaatccgcgtacaaccccgcgccaaccccggcgataataccgcatccggtgacgccattctcctgattgcgcgtagataatatcggaagattgtacgccgcggctttgatttcaagccacagcgggctgcgcgcgccgccgccggaagcgatcatttgttgcggatattgcccgcacgcctgcagctggcgcagattgcgccaggacgcaaaggccaccccttccaggaccgcgcggaataaatgaccgcggcgatgcttgcgctgcaggccgaagaactgcgcccgcgagttcgtgtgttcggccagacgctctcccgtcagatagggaagaaagagcagcccttccgcaccggccggcaccgccgcagcttcctgcaaaagctgcgggtgggtaatctggttatcggcaagcgccagccgcgcccagcggacggcatcgccgccggcgtcgagaatcgtaaatccgccccaggccgcgttagccagatgaaggttattgaccagcgggtggcgtaacggccgcggcgacactacggtgatcagcgtcgacgtgccggtggagtcggacgccatccccggctcatatactcccgagcccagcagagaggccgccatgtccgacgtaccggcaaccaccgggatccctggcggcaggcccgtcaggccggcggcgcgtggggttacctggccgataatgtcgctggaaagtttgaggtccggtagctgatcgacccgcaggccaaacgtttcgcaggcttgcgaagaccaggcgcgggtttcgctgtccatcaggaaatagcaggacgcctcgctatagtcggtcgccagggcgccggtcagcatgaaattaatatagtccttcggcatcaacaccttggcgagctttggccagcgctccggatgatgttcacgccaccaggctaatttgaaagcgggccaggccgccgcgggcggattatttaaatgcgccagccacgtttcccgcccttcgcgcgcggtaaaagcttccacctgcggctggctgcgcttgtcattccacagcagcgccctgtcctccaccagctcgccgcgatcgtccagcaggacggtgccgtgcatctgcccgcaggcgccaataaccgcaatctgcgcagccgtttcaggatagcggtaaagcacctcgcgtatgcagtcgcaggcggcctgccaccataaagacggggcctgttctgaccaacccgcacgcggcgtggtctgttcatactctctttgcgcaaagccgaccatcgtgccgtcaacgcgcaaaagagcggcgcgggtactgccagtgccaacatcaatcgtgagtattttatctttcatcactgactccggtgacgtcttaaggcgggccatcaggcccgcggtctctcagtttaatcggcgttcagctcgggaaagcgttccgggtgctgctccagttcagccagcacctttgtgaccgcgccatggctcatgccaaagcggcggacgccaagctggtacagggcgcgcaccgttgccagatcgcgaatccccccggcgcctttgatatcgattcgccctttaagctggtcggcaataatgctgactttttccaccgtcgcgccggtcggcgcccagccggtggaggttttgacccacttcatccccacctctacggcgatatcgcacacgcggcggatctgctcctcattgagatagtgcgtttcgaggatcaccttcgccggtaccggcgcggcggcgtccaccacgcggcgcaaatcttcgcgcacatagtcataatcgccggataacactttgccgatattcaccaccatatccacttcgcgggcgccatcggcaatcagctgccgcacttcctgaaccttggtgtcagtcgcatgcccgccgccgggaaagccgaccggcccgccaatcatcacctctcccgtcccctgctgcggcagcaacgtactgagaaaacgcgtccagcagggcagaacgtggacggaaataatgttgtatcgggctgccagctcggcgcaggcgcgaacgtccgcttcggtactggtggcctggactgcgctcaggtcgactaaacgtgcaaaacgtcgggttgtttcattcatggttttatcctgctctttgtttttagttgctttcatttaatgctcttaatcggcttaaatccatttaaaaacgcaccaaatgaaaataacgtgatcaaattagcatttttttatttcatttgcttttaattagcagatgggaaatgagcgatgcccttgatgaacgggcgtaaacgggcataaacgggcgcaaaggcaatattgcatttatttttgtttgtttttgtttatgcctgaataaagggcgagagagcgaaaccgctgccggatatgacgccaaaatgcgtacgctgtcacattgaccggcgacaaaacggtcgccttcgccggatattccggaggtctcaacgccctacgcaagggaaaggtaatctgattatgtacttcaggagaaagctatgttgccgctggaacgtcatcgtttgattgttgaactgctgggccaacgcggcgtgatgcgggtgaatgagattgcgcaagcgactcgggtctccagggaaacgattcgccgcgatctgagcgagctggaacggaaagggattttaaatcggagccatggcggagcgctggcggcggagaacccgctgccggcgatccgagcggcgtcgcccgccctgccggtcgaagatagccagggaagctttcagcagagaacgctgctgcacagcgaaggaaaaatgcgcgttgcccgcaaagcgctgcagtgtctccagccgggacagaccatcgtcctggacggcagcagcaccagctggtttttggcccggcagatgccggagatgacgctaacggttatcacgccctctatccgcatcttgcaaacgctgatgagcagacgctcgttgcatctcgtgggactggggggcgatttttccccgaccgaggaggcattcttcggtgaaaccgcctcacgaacgctgcgcgagtacgccgtcgatacgctctttttctcctgccaggggctggagcgcgatagcggtttatatgcgggtacggaagcccacgccgccctgttgaaacagatgatgctggccgcccgtcagaccgtggcattggtcgacggcagcaagctggggcgaacaggcgtcgcgcggatcggcggattgggcgagctggactgtttaatcaccgaaaagtttgtcgatccgctgctggaaaaagagatgacctggcataacgtcgggctacagatcgcctgagtacgccgtcatgacgtgacggtgactacgcgcattgtcgaaacgctgcttcccgcggcagggccagactttgcctgaaatcagccactaccggaataaaagaggccttatgcgttattacctttctccttcgctcatgtgtatggacatgatgaagctggcggaacagctgcactttttaaacggcaaagccgacaggctgcacgtcgacgtgatggacgggcactatgtgaaaaacctggcgctatcggccagctttgtggcgcagattcggccctatacgccgcttcccatcgatgtccacctgatggtcgaagagcccaccccgtttatcccggcgctgatagaagccggagcagacgccatttccctgcatccggaaaccatctgccgcgaagcttttcgggtcatcaatatgcttcgccaggcggggaaagaggtggggatggtgctcaatcccgccacgccggttgagagcatccagcactatctgcatctgctcgataaggtcacggtgatgaccgtcgatccgggctatgccggtcagccgtttattcccgaaatgaccgccaaaatcgcgcagcttcatcagctaaaagagagccgcagcctcaacttcttgctggaagtcgacggctcatgcaaccgcaacacctaccgtgagctgctgggagccggggcgcaggtattggtgatgggcagcagcggtttattccgcccggatatgccgctcgagcaggcctgggaaaaaatgtcccgcgatctgtccgccgcgctgcactcccccgagcacgtataaaggagcgaatgatgtcaggaaaagtctgtgtttttggttcattcaatttcgacatggtggccagagtggagcgctttccggtgccgggcgagtcgttagtggcctgcgggagcatgaccagcgccggcggaaaaggggcgaaccaggccaccgccgcgctaaaagcgggggcgaatgttcactatatcggcaagattggcaatgataccttcggccattttgcccgtcgtcatctgaagggcgtggggtttaacgccgtgacgctgctggtcgccgaagaggtccccaccggcaatgcgctgatttatgtggccggcaacgatgccgaaaacatgattgccgtcgaccccggcgcgaatatgacggtgaccgatgatgaaatcgccggctgcattcccgctatcggctgcgcggatgtggtgctggttcagctggagaataatctttccgccattgaacaggtcgttgacgccgcgaaagcagccggggccttcgtggtgctcaatcccgctccctggcagcccgttgagcacgcctttctaagcaaagtggatctgcttacgccgaacgccacggaggccgggttaatgaccgggcgccgggtcgactctctggcggccgcggccgaggccgccgatgcgctgcatgctcagggcgcgcgcaacgtcattatcaccctcggcgcaaagggcgccctgctgagcgagcagggcgtgaaatcccctattccatgctttccttctcatccccgcgataccaccggcgcgggcgatgcctttaacggcgcgctggcggcgcgtctggcctgcggcgagccgctgcatagcgcggcccgatttgcggcggcctacgccgccgtcagcgtcgaaaagcagggcgcatcatctttaccggattaccaggaggcacgagaacggcttttacgtgccgcctctgattatgaaatggcttaaaccctactgtataaaaaccattaagaggatagctcaatgagtacgctaatcacggataaggtcgataaagcggcggtccacaatgaaaaactggacgccagcgcgtatttaccgcacaccccctggctgcaatttttactggtctgttgcctgtttgcgctctgggggatggcgggcaacctgaatgatattttgatcgcccagtttaaaaagggcttcgatttaacggatacccagacggcgctggtgcagtcgatttttttcctcggctacttctttgtcgccctgcctgcggcggcgctgattaagcgttattcctataaagcggcgattattattgggctgtgcctgtacgccctcggctgtttcctgttcgtcccggccgcgcagatcatgacctacggcgcgttcctcgcctgcctgggggtgatcgcctgcggactctcttttctggaaacctcggcaaacacctactccagcctgctgggcccgatccactcctccacccagcgcattaacttttcgcagaccttcaactcgctgggcgtgatttccggcgtgctgattggccaggtgatggtcttcggcgaaaacgatccgggccatgaacagctgctggcgatgcccgccgccgccgcggacgccgcgcgccatcagatggtcggccaggtggtcgggccctatctgattatcggctccgtgctggtggtgctggcgctggtgttcgtgtttattaaattcccgtcgtgcaagggcacgccctctcagcagcaacagctcccgacggaaagcatggggcctacgctgaaacgcctgtttgccatcccgcgctttcgcctcgggatcctgtcgcagtttttgtacgtcggcgcccaggttggcgtatggagcttcacgattcgctttgtgcagctcgtgcagcagggcaccagcgagcactccgcaacctactggctgctggcttctctggtgatttacgccgtgggtaaaacggtggccacctggttgatgaaccgcctgaatccggcgctgctgctcggtacctttgccctggccgccaccgcccttttactggttgccgtattcagcagttcaatgctggcggtctatgcgctcattctggtcagcttctgtatggcgccatgctagccgacaaactttggtctggtcatcaaagggatggggaaagatacccagaccgcaggctcgatcgtggtgatgtcgattatcggcggggccgttattccgctggtgatgggcattatctcggatatgaacggcggcaatatgcaaatcgcctttatcgccccacttgtgtgctttgtgtatgtcgctttctacggtttctggtgcgtgcgtaagggggtataacatgcgcgaactggtcaacacgattgctcatattggctatcaggtcagcgacttaacgcgttcgctagccttctatgaaccgctgggctttcagcgccagcagcggtttagcaaaccgtcgccgcagggcgctattgaagtcgcgtttcttgaaatggcgggcgccgtcctcgagctgtaccagcttcccgaaggaacgccttttgacgcccctcgctgcggtatcgatcatctggcgctggaagtcagcgacctggatgcggtgcagcagcggctggcggcgctcggttatccgctcgatgaagggccgattgaggaagaaaatgtgcgcttcctgcttattcgcggccccgatggcgaacggctcgagtttgatgcctttaaacgctaaacggccgggctgatccccttctcccttttaggcccggttaacacgggtctaaaagcgggcttcctcaggctttacaaaagcctgcctgcttccagattttcgcccccccacctgacctctcctgcctattgtgcaatgttacaaaattgcttctgttttgttgattttctattgtgagccattcggcaatttcctctcctgaatttccccagactacttccagtcaatacgcaatatcaggagagacaaatgagcagcacctccgccgacttccagaatctgtaccaggccctgagacacagcgccgcccgcagcccggatgccctggcgctggcgtttgaggatcggcgctatctgtaccgcgattttcacctgcgggtacagcgagcgatggcgcagcttgaccaggtctggtcgctgcgcaaaggcgaccgaatcctgctggcctgggggaatcatcccgcattttgcgaagtcctttttgccgcgcttggtctgggcatcgaagtggtgcctttcagcacgaagcttaagcaggccgaaagcgaggagctggtgggccatatcgccccgcgggtcgtgctgttcgatgcgaccgtgcaggactggctgaaaaacacccccgacgcgcgcgcggtttcgctcagcgaatggcaggcgctcccccttcccgaaccgctgacccgccagccggtcccggttaaccgcgacgatacggcggtgatgatgttcacctccggtaccaccggagagcctaaaggggcgattatcacgcacaataacctgctctgcgcgattgacgcctatacgcaaaaactgaatctcaccgccgcggatagcaccattctggcggtacctatctatcacatcaccggcctgtcggcgctgctggcgctgtttattagcctcggcgcgagcatctggctgcagcaccggttcaacgccccgcaggtgatcggcaccctgcgcgaacagaacattacctttctgcacggctcgccaaccatctttatccttctctgccaggcggcgcgcgagcagagcgccagtcatccaggcgatttccccgcgttacgcacgattgcctgcggcgcgggccatctgagcgatggactgatcaacgagttaaaaaccctgttcccgcacacggcgattcagccgatctacgggctcaccgaaacgacctcacccgcgacgatttttccgggcgacgtctggggcagcgataaatgcggcagttcgggccaggcgatccccggcctcgccattacgatccgcaacgatcgccagcagctcctccccgccgggcaaatcgggcatatctggctaaaaggcgacgtggtgatccgcgagtactggcagcacagcgaacgacgcccgagctgcgatgcgcagggctggttttgtaccggcgacctgggctatctcgacgatgaaggctggttgtacataaaagaccgcagcaaggacatgatcaatcgcggcggagagaagatttactcgctggagctggaaaacattctctctacctatcggggagtgcgggaagttgccgtcatcccgacccccagcccgatctatggcgaagagccggtggcgtttatcgtgccggacggccagcaccacctgaccagcgaagagatcctcggctggctgaaggtcaaaatcgcccgctttaagctgccggcgcgcattattttcacccgcgttttaccgcgcacccataacggaaaagtgagcaaacaacagctcaaaacgcgcctcgcggaatccatcatcacgctatcaacggaggataaaaagtgagcagcaaatttatcgacgcccatcaagcggcccagcgggtcgccagcggcgacaccgtctgcaccgtcgggatgacgcttatcggcgcggcggagtccattttaagcgctatcgaagcgcgctttctgaccgcgggcgaaccgcgcgacctgacgctgctgcatgccgctgggcaaagcgatcgccagcgcggcatccagcacttcgcccacccgggtatggtaacgcggcttatcggctcgcactggggcctggcgccgcgctggatggcgatgatcaacaacaacgaagtggaagcctggtgcctgccgcaggggcagatcgtccatctctatagcgcgatggccgccgggcttaccgggcggctttcccccgtcgggctcggtacctttgtcgatccgcgcatggaaggcgggcggatgaacgcccgcacccgcgaacggcccgatctgatcgagcacgtgacgtttcgcggcgacgaatatctgttctacccggccattcctctggacgtggtcattgtgcgcggcacccatgctgatgaagagggcaacctcacgaccgatgaagaggtgatgaagctggaagttctgcacgcggttctcgccgccagacgctatggggcgaaggtgctggcgcaggtgaaatatcgcgtggcgaaaggctcgctgcatccgaaaagcatcaccgttcccggcaacctgatcgacgccattgtggtatgcgaagagccgcagatggatcaccgccagacctccagctgggacttcgatccggcgctgtgcggcgatatccagctgcccgccgcgcagaacgcgccgctgccgctcgacctgcgcaagcttatcgggcggattgcctgccgctatctgacgcccggctgcgtcatcaatctcggcaccggcattcctaacgacgttattggcgccatcattcaccaagaacggctcggcgagcaggtcaccatcaccgtggagtctgggatctacggcgggcagcaggcgggcggcgttgatttcggcatcggtcgtaacctgagcgcgatgataagccaccaggatcaaatgctctattacaacggcgcgggggtcgatatcacctttatgggcgccggcgagatggacccgcacggccacgtcaacgccacgcggctcggcgcatcctgccccggcgcgggcggttttatcgatatcacccagaatgcccgccacgtcgtgttctgctcctcttttaccgccaaagggctggagatcgcctgtgaacaaggggccctgcatatccgccgcgaaggcgaggtacgcaaattcgtcgccggggtgaatcaggtttcctacaacggcgagctggcccgcgccaaaggacaaaccatgcattacgtcaccgaacgggcggttttcgaactgcgcccggaggggccggtgctgacggaaatcgcccccggtatcgatcttgagcgcgacatcctggcgcatatggattttcgtccggcgatcgccgcggatcttcaggttatggacagtcgcttgttcaccccgcagccctgcggcctcgcggaacatctgtcccggaattcatcctctgactcacaaggaaattagctatgaaacttgccagtaaaaccgccattgttaccggcgccgcgcgcggtatcggctttggcattgctcaggtgcttgcgcgggaaggcgcgcgcgtgatcatcgccgatcgcgacgctcacggcgaagccgccgccgcatccctgcgcaaatcgggcgcacaggcgctgtttatcagctgcaatatcggtgaaaaagcgcaggtcgaagcgctgttttcccaagccgaagaggcgtttggcccggtggatattgtggtgaataacgccggaatcaaccgcgacgccatgctgcacaaactctccgaagcggactgggacacggtgatcgatgtcaatctgaagggcacttttctctgtatgcagcaggccgccatccgcatgcgcgagcgcggcgcgggccgcattatcaatatcgcttccgccagctggcttggcaacgtcggacaaaccaactattcggcgtcaaaagccggcgtggtggggatgaccaaaaccgcctgccgcgaactggcgaaaaaaggcgtcacggttaacgccatctgcccgggctttatcgataccgatatgacgcgcggcgtcccggaaaacgtctggcaaatcatgattaacaagatccctgcgggctacgccggggaggcgaaagacgttggcgagtgcgtggcgtttctggcgtccgacggcgcgcgctatatcaacggggaagtgattaacgtcggcggcggcatggtgctgtaaggagaaaaaagatgacacaggctaatgatattgtggttgtcagcggcgtgcgtaccgctattggcacgtttaacggcagtcttaagcatacccaccagcatgacctcggagctgcggttattcgcgaagcgatcgcccgcgccggacttgcgccgcaggatatcgacgaaacgatcgtcggcaacgtcgggcaaatcgccgaaagcggttttatcgcccgcatctgccagctgcgggcggggatcccgcaggagagcaccgcgtattcggttaaccgccagtgcggctccgggcttcaggccctggcggacggcatgatgcagctgcaaagcggccaggccgaggtggtcgtcgcctgcggaacggaaaatatgacccagttgccctactacctgcgcaaagcgcgcgatggctatcgcatgggccacggcgagctggaagatggactgatctccatccttacctggccagaagggccttatcacaacggcatcacggcggaaaacgttgcgcaacgcttcggtatctctcgcgaagcgatggacgatttcgcctggtcgagccagcagaaggcgctgaaggcgatcgctgaggatcgattccgcgagcagattctggcccttgaggtaccggacggcaaaaaagcgacccgcctgttcgcgaccgatgaacacccgcgcgacaccccgcgcgaaaagctcgccgcgctgcgtccggcatttaaagccgacggcgtggtgacggcggccaactcctccggcattaacgacggcgcggccgcgctggtgatgatgacccgccagcaggcggaacagcgcggcttaaccccgcgcatgcggattcgcggctgggcggtcgccggctgcggcgcggagattatggggtttggcccctctcccgctacccgacgcctgatggaccgtctcaatatggatgttcacgccatcgatttaattgaactcaatgaggccttcgccgcccaggcgctggcggtgatgaacgatctgcgtctcgatccagcccgcgttaacgtcaacggcggcgcgatcgccctcggccacccggtgggcgccagcggtgcgatcctgccggtcaaactgatgtatgaaatggcgcgcagcggcgcacgcaccggtctggtcaccatgtgcattggcggcggccaggggatttctatgctgttcgagcgcgaaggcgcttaggaaaagacggcccgaagtggggcttcgggccgggcgtcgttcgggtcagcacccggcgacaacctgtgagctgacgaacgggatcgacgcgatcccggcaaggcttctgaccacgaatacggggaaataataaccatgtccgcaataaatgaaaaggcggtaaacggggcgcagctacagcgcacccataaaaagatctaccgccatttgatgccgttgcttatcgtggcgtacatcatcagctttattgatcgtaccaatattggcatggcgaaagcgaccatgtcggtggatatcggcctttccgcaaccgcattcggcctcggggccgggttgttttttctcacctacgcggtgctggagatccccagcaacctgtttttaacccggattggcgcacggcgctggatcgcccgcatcatgatcacctgggggatcatctcctgcggcatggcgtttgtcaccgggcctacgtccttttacgtgatgcgccttttgctcggcgccgccgaagcagggctctatccgggcattatttactacctgaccctctggtttggccgcgaagagcgcgctaaagccaccggtctgttcctgctgggagtctgcctggccaatattatcggcgcgccgctgggcggattgttattaagccttgatggaatgtccggctggcacggctggcagtggatgttctttatcgaagggctgcctgcgatagcgctggcgttcgtcgtctggcgcaggctgccggataaacctgccgacgcccgctggctggacagcaacgacgtggaggcaatcaacgcggtgctggagaaagaagccaaggagacgcgccatacgccgagccgtttttccctgaaaaccgcgctcaccacccgggtgtttttgttgctggtgctgatttactttacccatcagttttcagtttacggcctgagttatttcctgccggggatcatcggtagctggggccagcttactccgctgcagatcggtctgctgaccgccatcccgtggatcgcagccgccgctggcgggatcctgctgccgcgtttcgcccggacggagcagcgttcgcgcagcatgctgatggctggatatctggtcatggcgaccggcatggccattggcgcgattgccggccacggcgtggcgctgcttggcttctcgctggccgctttcatgttcttcgccatgcaatccatcatctttaactggctcccctcgatcatgagcgggcatatgctggcgggcagcttcggcttgcttaactgcctcgggctgtgcggcggctttctcgggccgtttatcctcggcgcgtttgaggaccgcaccggcgcggcaacgtccggcttatggttcgccgtcgcgctactgatcgtcggcgcgctggtgtctctgttcatcaaaagttcgtcatcccccggcagtgcatcggcaaaacaagccgacggcgaaaaagcgtaatcaggaggttcttatgcgcatcgaagtcttactggatttaaaaactcgactcggcgaaagcccggtctgggatgtcgaacagcagcgtctttggtgggtggacagcctcgacgggcgcctgttcgcctgtaacgcgcagggcggcgcgattaagagctgggacgtgcggcagaaaattggctcgttcgccctgcgccagaacggcgaaggcgcggtggtggcgctagagaatggcgtgcatctgctcgacttcgccagcggcgagctgacgctactgcaccatccggaagcggaccgaccctttaaccggctcaacgacggcaaagtcgatcgtcagggacgttttctgtttggatcgatggatatgcgtgaagaggagccgagcggcgcgctatatcgcctggacgccgatctgtcgctgcacgtgctgaagaaaaatatcatcgtctctaacgccccgtgctggagcccctccggcgagacgttctattttgccgatacctggacgggcgaaatctgcgcctgggactacaacaccgcgaccggcgatctctccggagaacgagtcttttgccgtgtcgatcgcagcgaaggcggcgcggcggatggcgccaccgtggacagcgaaggctatctgtggaacgcgctggtctacgcgggcaagctggtgcgctacacgccggagggcaaggtcgatcgcatcattgagatgccggtgaaaaaagtgaccagcgtcatgttcggcggcgaaaacctcgacgtgctgtacgtcacctcaatggcgcagccgcccctcccgcgcttcccggaagataatcagctgcgcggcagcctgttcgccctatacgacctgggcgtgaccggcgtagcggaacggcgttttgccggctaagccaacctccggctcgccgcgataacaataatacccggcgaactgactctgaccctgacaccaggcggcgcgcatcatgctgtcgcgacgccgcggagtaaacacgactatgacaacaatcaatcacacaccagccggcgaacaaggtggaaaaaagcggctgatacatcgtttctcctgggtttcgctgctggtttgctggctaatctgggtgcttaacgcctacgatcgcgagatgatcctgcgccttggcccggtcatctctaaagagttttcgctctcgccggaacagtggggcaacgtcgtcgccctgattatggttgcccttgcggtgctggatatccccggctccatctggagcgatcgctacggttcaggctggaagcgagcgcgctttcaggtaccgctggtgctgggctataccgccctctcttttctttccggaattaaagcgatcagccacgggctgacggcttttgtgctgctgcgcgttggcgtcaacctcggggccggctggggcgagcccgtcggcgtcagtaacaccgcagagtggtggccgaaagagaaacgcggcttcgcgctgggggtgcatcataccggctatccgattggcgcgctgctgagcggcgtggtggcaagtctggtgctttccgcatttggcgaaggcagctggcgctactgcttcctgctggcgctgatcgtcgccatcccgctgatgattttctgggcgaaatattccaccgccgatcgcatcaacacgctttatctgcatatcgatagccaggggatgacgcgcccggcgacccaggaaagcagccatgttgccaaaggcgaagggatgaagacctttttacgcaccctgcgcaaccgcaatatttcgctaacggcgggcaataccctgctgacgcaaattgtctatatgggcattaacgttgtgctgccgccgtacctttatcacgtctccggcctgtcgctggcggcatccgccgggctaagtattatcttcacgcttaccggtaccctgggccagataatttggcccaggctctccgatagctttggccgtaaacgtactctgatcgtctgcggtctgtggatgagtatcggcattgcgctgttctatttcgccaccaatatgccgcgccttatcgccattcagctattttttggcctggtggccaacgccgtgtggcctatctactacgccatggcttcggactccgccgaagaacgcgccacctctaccgccaacggcattatcaccacggcgatgtttatcggcggcggcatttcgccattgcttatgggctggctcatccagttcggtgggggatgggaaaatccggcgggttatatctacgccttctttaccatggcgggatgcgcgctgctggggatgttattgcagctcatgaccaccgataaaacgccgcgcaaagcgcattaacgcaggagaacgcatgaagattgttatcgcgctggattcgtttaagggtagctgtagcgcgcaggccgcttgcgcagcggtagcacaggggttgcgccgggttgacgaggagctggagctggtcgaaatgcccgtgtcggacggcggagaggggctgctctcggcccttgcggaaagtccgcagctgaagggcgcgaggtggcagcagcagcgttgcgcctcgccttacggtctctccgtacaggccgcatttctgatcctgcccggcgaacgggccattatcgagatggcgcaaagctgtgggctggagctcacgccgaaagcgcagcgggatgtgcgccaggccagcagctttggcctgggtgagcaggtaaaagcggcgctggatgccgggtgtcggcgtttgattatcgggctgggcggcagcgcgaccaacgatggcggcatcggttttgcccaggcgcttggcgcccgcttctggcgcgaggacggcacgctgctgccggttcccgcggcgggcaaggacctagcgcatattcagcgcatcgatttaagcgccatggacccgcgcttacgacaggccgaaatacaggcctcctgcgacgtcacaaatcctctgcttggggaagatggcgccacctgggtgtatggcgcgcagaaaggcgcggatgaggcggcgctcagggagctggaggcgggtatggcgcactacagtcggcagcttacgcaaacgctcggctacgacgtcagcgaacggcccggcgccggggccgcgggcggtatgggggccgcgctgatcgcctatgcgggcgccacgctgcgcccgggcattgacctggtgctcgaactgcttaacgccgaccgtcatcttagcgatgccgcactgaccatcgtcggggaaggctggctcgatcgtcagagcgcctttggtaaagccccggtgggcgtggcgggcaaagcggcgcgccacggcgtaccggttgtggccctttgcggcggacgcgatgaaagcagtcggcaattgtatcaacaccatattgacgcgatgtggtctatctgccagcgccctatgccgctggcggagtcgatgaacacatgcgaacagctcctcgccgacgcagcggagaatgttctacgaacctttctgagcgggcggcgcggagaggcacataagcggataactgtatgattattacgacggcgctggctaatgaaattgtcgcccgggcaatggcgataattcatcataacgtgaacgtgattgaccatcatggacagatcattgcctcaggtgaacggcatcgtatcggcgagcagcatgagatcgcccgtgaggtgatacgcaccggtaaacgtatttgtattaataacaccgcggaagccgcgcgtttccagaatgtgcatcccggtattaatcatcccattatctatgacgatcgcgtggtgatggtggtgggcatcagcggcgatcccgcggcgatcagccgctatgctgaactggcggtactcaccgccgagctgctggtccgccaggccatagagatgcgggaaaccaactggcgacagcgtctgcgcgataccctgtttggtcaatatcttgatcaaggcgcttcgcccgccggacaggaagcgctgcatcgcctggtggagcttggcttcgcttttgatgcgccgctggtgccggtcgtggtaaccgtgcaggtcgaacagcatcagctaagcgaaatactgagtacgctgctgcgggaattctcgcagctgtccggggtaagagacgtgattttgctgggcagtaatgaaatattgctcctcaatacgctgagcgaatcccaggaaacgctgctgcggggcatcgagtttgtcctcagcaatcagatcagccattaccatatcggtattggcgtgcaggcggacagcgctccggatattcgcgaggccatccgattcgccaggtcggtgattgaggtggggagcaaagtgcagccgcagcggcagatctactactttcgcgaaatggcgatgctctgcctgttccgggtgctggaagacagctatatggtcaatttttttatcaataacgtacgccagctgcttgagcatgattccggcgaagtgctgctggataccctcagcagctttattgccaataacgccgagccgggcaaaacgtcgctgctgttggggattcatcgcaatacgctcacctaccggctgcagcagattaaaaagcatattcagctcgatccgatggtcttcaccgacctgacgcagctggcggtgtcggtacactgctatcgtcggcagaacccgcgccagagcgaatggattgataccttaagctaacgtgcggcgggctagcaggccggtacgcgccctcgccacccggcaccgcgtatcactctgagatcgccgtttatcaaaataatagcgcgcccggcgattttatcgcaggcggtgcctccgtcgccggtggcgggcttttcgcctcagccgttcggcggagcttgctcgcttcagtcgccatttttgtacgcaatttaatcaaatggcaccgttcttgccttttatctacgttccccgaccgcagcattcgtcggccaatatcgataaaaaggacaggaaaatggcgcaaatgaatgaaaacatcgcgaccgcaccggtctctcccctccgcgattttttcgcgaaaccccgtatcatcgccaggcccggctttaaccgctggctggtgccaccggccgcgctggcggttcatctctgtataggtatggcctatgggttttccgtttactggctgcctatgtcgcagctcataggaggaagcgcgtccttgcaatgccccgccacgatgtcgttctggcagcagctgtttacccgcgattgcgactggaaaatctccatgctgggctggacctacacgctgttttttgtttttctcggctgttcggcggcgctgtggggcagctggcttgagaaggttggaccgcggctggtgagctttattgccactttgtgctggtgcggcggcctgctgctatccagcgtcgctatctatttccatcagctgtggctgctgtggctgggggccggggtcatcggcggaatcggtctcggactgggctatatttcaccggtttcgacgctgctgcgctggtttcctgacaagcgcggaatggcggccgggatggcgattatgggttttggcgggggagcgctggtgggcgcaccgctggcaaacggtctgatgaattacttcgccggtccggccggcaacggggtatggcaaagcattctggcgctggcggcgatttatgcgctgtttatgctcgccggtacctttggctatcgcctgccgcccatgggctggcatccttcgggtgagaaggcgcaaaaaacgattcgcaataatcccacgatccaggtgcacgtccgcgttgcctgccgcactccgcagttctggctgctgtggatggtgctgtggctcaacgtcaccgcggggatcggcattctcggtatggcttcgccgatgctgcaggagatctttgccggcaaactgctgtcgctcgatctcagctggcatgagctgaacggcgagcagctgaaacgcattgcaaccatggccgcaggatttaccggcctgctcagcctgtttaacatcctgggacgttttttctgggcatcggtatccgacctgtgcggacgcaaaatgacctttgcgatcattttctgcctgggggccgtgctgtacggcacgttgccgctggtgaatcacggcggctatatcgcgctgtatgtctgcgcgatgtgcattatcatttcgatgtacggcggaggctttgccagtattcccgcctatctggccgacgtctttggctcacaaatggtgggcgcgattcacgggcgcctgttaaccgcctggtcggcggcggggatcagcggcccggttctggtgaactatctgcgcgagtatcagctgacgcacggggtctcgcccgagcgcgtctacgatattacgctgatggtcctgaccggcctgctggtattgggttttatctgtaatcagctggtgcgtccgctgacggaagagcatgcgatgaccgcggaacagcagcagcaggcgaaaggactgtataccatcaacaaggatgcccagctcacgtgggagccccgcccgtccacgctgctgttaaccgtaagctggctggcggtgagcgtgccgctgttatggggcgtcggtaccaccctccagcaggccgtgaaattctttatgtaggttgttgccgccgatggcccggcggcttctacgaacctaccggcgcgtggcgatcgcgtgacgcaatatgctcaacgatccgctctaccgcctcttctgcggtcagcaccgaggtatccagagtcaggctggcggtgcgccagggttcgtactcacgggtgataaccttttgccagtccggcagaatatgaccgcgaatatccgccactcggttttccacgcgataccgatgctgcatttggtcggagcaggtcagttctatctccagataaggcgcggcattctcggtcgcgaccgctctccaggcctggcgggtaatggctatagggttaactgagtcggcaatcaccacgttgcccagcctgaggttatccgcagcaatggcgtacgccgccagatatccggccggtcctatatcgtgccgggtgacggtttcggcgcggatcagcgcctgttcaattgaatcaatccgtaaccagacggcccccagcctggcggcaagcaggcgagcgatggttgatttcccggtaccgggcagaccgccaaagatcagtaacatcgatatcccattacggcagcgtcatgttattgccgctggcgatgattattggtgattttccatcttacctgaccagggttcttattcagccaggcattattaatattcaatactggctgaaactgcataagcggcatcaggaggcgtctgcagataattgtcatagtcaccctccagaatatcgttcagtgagaatgataccgtcccgcaggccggattgtgataaatggtgacgttgctcatagatagcagtatctcatgacaaagtgaaagagagacgtagcgccaggataaagaagtacagttgatcaagcgcctgggattcagtgattattgtagcctggcgacgtcagatagagaggcgtgcctgccatctcatgccgggtaagcccttgtagtataataattttcgctatccaatcatgaccccatataaactcttcagccggaaaaatttttcccacataagacgttctgagcatccagtacagcctccctcgtctcattgaccctgattgccgagtagatatcaatattcagtttctgagattcatcgtctgtcagttcgcggtagcacagcccttcctgattaaacgtgcatttcgactggggcatcagtgcaaaccctttgcctcttgcgatgcgggtgagcataacgagtgaatcatccggctctttaacccttttgagcgggacattgagctgttcaaaaaaactttcacatttgtcataaaatgaagggtttgcgcttcttgaaaaccagaaaagtggtaaatcactgacgtctttgagcgatactttttctttcaggctggcgggatgtatagccggcattgctatcagcagcggttcgcagcaaacccagcgatactgaaccatatcttcatggccagtgcccttttcccccgtaagcacgaggtcaagcgtgttttttgacaggcattgaaggagctgggcagaagtcagattaggtgtttcaacgtcgtctccggcatccagttcgataagctgtctgctgacgggttcgataaattcaaaattaagcgtccgggtaaggccgatccgtaccttccccccggatgccagtgaaccggttttcagttcattaagttccagcaggatcttctctgctcttattaccagggcctggccagcctccgtcaggctgacgtcatgcgtactgcggctgaatagctgctgattcagcacgccttcgaggcactttatatgtcgggttagcggaggctgagtcattctgagccgttcagcagctctgcgaaaattcagctcatgagcaacagcaaggaagcactggagctgtttaacgctagggaggtggttacttatcaggtgtcctgcgatcgccatagattcgagcctgccagtcaaaaaatttattctaaactcttttgtattctgagtgttaacacgaatgatcatatcagggatcagtctgtttacagtaatacgaaaattgaattacacattaaacaattccatcctcgtcacagcttgataaatttctcccgaactcaatcagaaatctatttggagataaaaatgtcagctaactatgtactggtctcacgctttccgttaaaaaataatgtttccgctgctgatttctcgttcttaaaaaacagcggcagcacacgatactattattcagaagagcagggagtgaatgaacttctggagctgcgtgcatttaacgacatcaaggaaatttcgtgggtagaagaagagatggtatccatgttccacagactggctgatattctttctgccgatattcgcagagaattgcttaagtttgtagaatctccgattgacaacaagaaagatctccctgaaagccagtacattcaacttcgccatgttgaagttccggctcataattatcagcagtatcgtcagtggcgcgatgagaccatttttaatgttgtcagggacaataaagataaaattgaaagctttgaagcattccactctcttattagcggtgttccgggtgtaatgtttatctcctccttcaatggcgataagcaatcctataaggaagccttcaccaatgcgcgttaccaggaaattatccagcaagctggagacaattacatcaccggaggcaatgaaggactttacacccgcatctaccatgcctgttgcagctgaggaatgataaatgaactataaaaaactggttattgtaggcgataagtttaatgaattcgcaaatggtaaagatgttctgacaatttctcagcttgaattactttcgcaaattccagccaacattattgataaagaacatgagattattatcggccagggtgtacgtaaagatttcgcaggaaaagtcatttcgaatcaggcaagaaatgttgttcatggcaataaacttaaaatgtgctctctggaaaaattggtcagagataaaaaaaatgcacattgtcataaaaggttggagcagaatgttcttatcggctcagcagagcagaccgaacataacagtgaactttttgcaatgccgctgctgattgacgaacgctgtgagctcatggccgatcatcagaccggccagcatattcaggggatgcttctggtcgaggcaagtcgtcaggcttttatcgccgttaccgaagagtttatttataagcaggaagcaggacgctactacgtcattaacagcatggcgatgaccttttccagctttctgtttcctttaccggcgctggtccattttgaattccttgagaaggacattaatgagcgaagggggcgtttcagagcacaggttcgcgtgactcagcatcagacgctttgcgcgacgatggatgtatcgttcaccgtatatccttcagctctgattgctgaaaaggaaaaactgctggctgaagccgccatgcaggcgacaattgctgaacagaacatcgcgacacacggggtgacgcatgtccaaatcagctagccgaacataccgcctggctgtgaccacgcaggggccgctttacccccctgcggaggtcatggacggtaacggcaactttgtggtggttggcatggtgccgggtgataacgggctggaatggcgaagcgtgcttgtggcagcagacagccccgtgcccgaattcggcgcgacgaagccttacagaatattgcgagatattgaaggtatggcgcaggatgaagttaaggatatcatcctgcatacccttcctttacccatcccatcaaataattacgggatgctttttgcaccggagcagcgaccgcaggcgaacaccgaaagccgccccagtctgcctctgcatgaaggctatattgctgattaccgcagcagtgatggcaaacgtcaggttcagcctgtcacactggaagactggatgcatgcggaaggtacgctggatgtctgtctgtctgaagacagcaggcgcgcaaggtttacgttttctttccgtaatcttgttcccgacagtgtttataccgtgatgagccttcgggaaaaagatttagcgactgagaatccaagccgaccgggaccattgggcatacctaacgtttttattaccgatcataacggtaatgcagattactgggcggaattgcccgatcctttcccggcacatgaacggaatgaaaaccggattattaacgttgttgtcctgtatatgagttcccgccagagctacggcggcgcaatcggactttatggtctgggtggtgacattcatgctcatttaaaactaaaggtccgttcctttgatgaatttactaccgtagagtgaggtaaaatatgccatttgttcacatcaccacctggcctataaaagatgaaggtaaaattatccggctccaggaagatattacgtttgctgtgcataaacataccggagcgccgctggataaaatctcggttgtcatttctgaaatacatccttctcgctgggcagacgcaggggttcccggaaaccataaagattttcaggaaaaaagccgaaggaaaaattacgaggagtgagttttgcaacaagcagccgctttttttgacgtcgatgagacgctgatcaatattaaaagtatgtttgatttttttaacttctggtgcaaggagaataatgaacacattaaactccataattatatggcgaatttccagtctgaagttaaaaaaggaactccccgtgagcatctcaacagggaatactaccggcaatttgcaggtatcagttataaggcacttgaagaggctggtgaaagatggttcagatttaagctgaattcagaattatttataggaagcgcggtttcggctcttaaaaaacatcaggctgaaaatatggatattgtttttatatccggctcaatgcttcccgttctttctcctgtcgcaagataccttggcgtgcaagatattctttgcgcaccactgaagttcactgctgcaggggaaatgacgggtgaaataggttatccacagacgattggtgacggaaagaaagatgcgctccttcagttttgcgaacagagaaatattaatccttctgactgttatgcctatggtgacgatctctctgacattccgatgcttgcatcaaccggccaccctgtctgtgtaggaaaacattcagcgctggccagacacgcgataacacatcgctggcaggtcatttaaaccaaccttgaggtaagaatatatgcattcagaaaaatccccgcaggatatgaccttcaggtcttggcttgccttgtttattctggccctttcaacgtttactatcgttaccacagaactggctccggtaggcctgctgacgcccattgcagagggacttggcgcctctgagtcagcggttggtatgacggtttcactttacgcctgggtgggcgcactgagcgcactctttgcatcagtatttcttggtaacgtggccaagaagcggcttctgctcacactcacggtcatactttttctttctaacgttcttgccgccacggtaaacacatacgccatactgctagtcgcacgcgtactgggcgcgctggcacatggcgcattctgggcgatgatcggcgccaccgcagtggctatcgtgccagcccgattccttggcgcagcaacgtctatcgtttttggtggcgtctcggctgccagcgtatttggcgtgccgatatcaaattatattggtatacacttcggctggagacaggcgttctggctgatggctttactcagcgtggttgcctttgccggcattaccatactggtgccacagataaccagtaaaagtgcgatcggcctgggggcgctcaaaagcgtatttaaatcctccgcgctgtggaaaatttattccgccacgttactggccgtaaccgcacactttgccgcttttacatacattgaaccctggctgcacacgcagcattcccttgccacatccgtcatcccggcggttctgtttgtttacggtatcgctggtcttgccggcaattttctcaccggaatggtgattgataaacatctcaaagcaacggtatcggtatcggtcgtgcttatctgtgctgtgctggtatttctgggtttatccggtacatccctttcaggcactgcggtctttaccgcaatggtcatctggggcgtggctgtatccgggatttttgtgggcttccagacgtgggtcctgcgcctggcggaagataaagccttcccggcgtccgcggtttacgtttcattcttcaataccgctattggtgtcggggcgtctgcaggtgcctggatggtatccgctttttccgtcccactgctttatatcgcagccggcgcagctatcgggctttctgtccttctcgttgccgctattccgacgcgcctgaggtctgaacaaaccactccggagaaatattatgagccaaactgatgagctgacacgctatggcagagacattatggatcgtcttgagtccggactcgccgataaagtcaccacccgactgagcgaacttgattccaccttaccgaccctgattaccgattacgcttttggcgctgtggttggccgtcccggactggatctcagaacgagagaaatgctgacggttgcttcgcttgtgacgctgggtaacgcaatgccacagcttgaattacacatgagagcggcactcaataccggcgtcaccccggaagagctgcttgaaatcgtgatacagatggctgtctatgccggcgttccggcatgcatgaacggcctgacggcctaccgcgccgctatggcggcgaccggccatactctgccaggcctgaaagaggaaatgtcatgaacgaagttgtgattgtttctgcaaaacgtactgcaacgggtgcattcatgggttccctgtcgggccattccgcagcagaactcgggagtcacgtcattcgtgcgcttcttgaagactcaggagtggaggccagtgagatttctcaggttattatgggacaggtactgacggcaggatgtggccagaatcccgcacgtcagtccgcgctgaatgccgggctacccgttgaaacgcaatgtctgacgattaacaaggtctgcggttcaggtctcaaatcagttcatctggccatgctggcgctgcagacgggtgaggcagaattcgtcattgccggcggtcaggaaagcatgtctaacgcccctcatattctgatggcttcacgctccgggacaaggctgggggattgtaatatgagggatagcgtggtgtccgatggactctgggatgctttcgataataaccatatgggcgtcaccgccgaaaatgttgcagctgagttcagcatcagtcgcgaaatgcaagatgaatacgcgctgctgtcccacataaaggcaatggatgctcaggaaaagggaatatttgctcgtgaaatagttcccgttgaatggcaggacaggaaaggcaaaaccctgagagttgacacggatgaaggcccccgcaaaaccagcattgaaaaactaatgcagctgaaacccgtattcagaaagggaggaactgtgacggcaggtaatgcatcctctcttaatgatggcgcggccgctgtccttctttgtaccagaaaaactgccgaggcacgtgggctgccggttttagcgtctcttgccgcgtttgcgaattcggggattaagccggcattaatgggtgccgctccggtacaggctatcgcagactgtctttcccgctctggctggaaaccagaagatgttgatcacctggagtccaatgaagcgtttgcagcccaggcgctggcagtgattgaccagacgggtatttcacccgatcgtattaatccctatggcggagcaatcgcactcgggcatgctatcggtgcctcgggatgccgcattctggtcaccctcgtgcatggcctcctgcgtaatgataacaaacgcggtgttgcagcgctgtgtgttggcggcggtgaaggggtggcgctgagcgtttaccgctgaagaaaaattatcggctgtacagcggctgggctgttaatgaaaaacaaaacaaccgggcaatgcccggtttcatattatgtaaacggatttcaggcattaacgcctttcataccttcttcagaataccggccgcctttaatctcaacgcgctggtgaatatcgttcagtagcacaacatctgatttgtccagagcgatgtcagccgcctgcgcattttcggccagataactgatgtgcttggtaccggggatcggtaccagcttatcgtactgcgcgagcagccaggccagcgccacctgacccgaggaacaaccgtacttttcagtaagcgggagaacagcatcgagaagctgtacgttgtgatcaaggctggactgaatgaaacgctcattatttttacggaagtcaccttcagaaaaatcgctgtttttacggtattttcctgtcaggaacccccttcccagcggagaatagggtaccaggccaatccccagctctttcactgtcggcaggatttcatcttcaatgtcacgtgtccatagtgaatattctgtctgcagggctgtgattgggtgtacagcatgggcccggcgaagggtcgatgcagagacttcacaaagtccgatatgattgatctttccatctttgacgagacggctcagacactccatgctctcctcgacaggtgtcgccgggctgaccctgtgaagatagaacagatcgatccgttcaacgccgagccttttgagagattcattacagcagtgggtaatgtagtccggttgattgttaatggtgcgggcataagcctcatcaggcgcccgatcgattccgcactttgtggcaattctgaactgctcacgcgtagccttatcgagtccggcaagaaagtggccaatcagccgttcattgtgaccccgtccgtacaggttagcggtatcaatgaacgtaatatccaggtcaatgagtttatgtaacagctgccgggaagccttgtcatctgtctggccataaaattcgctcagtcccatcgcaccatagccgactgaactgacaataaggttttgagataaatttcgggtatgcataatgactcctttttttacaccatgattgtttcaccccgattacggttaatgaattgtcattttcgttatgcaaaaaaagtatcaaggcgggctgcataaaggtgtagctcgtaacgcgctggcgtgtcggtatgcatgcaccggcaggaagaaatcagggaccgaatgaccgctaaaggctggagagatccagccttccctttttccctgattttggacaataccatccataaagcccgttggtggtaagacaccgcgcggagccgtcaggcgacaacatcagggtatgtcagacatcaggatgaccatatacccgaaggagcgaggccgaaccactggcagagcctgcatgtggtgtgcaagtaccgtgaccactgacagtgtaccttgtgttggtaaactatcgttcaatggtaggacgatcacagacaacttatccaaggtaagctattgatataaatgagaatttatatgaagctttgccacagcgggagatattctggagcggcgaagggattagaacaagatgttcaataatttgaaaaatatagaattttcaagttatatcttaacttatacccccaaagatacccccaaagcacagaggctttgaattcaagtaattacctttgtcgataaatcagcaggaagcgagatgatggcaaatggcaggcatactcgaaagcagcgataccgttagcatcagactaattacgattcattaaacccagatcgcgacgggccctcatgatatcaataatcgtgagatatggcgtttgttcttgccagctaaaccctctgcgatcgatacgaaccagttcgtacttttccactagaaagttaatggcattagcgagagtgataccggcatcgatatgttcctgtatgacggtttcatcacagaaaggtgtatcgtttagtgtcaggccataatgctgttccagcagacgactaagtagcatttgccagatagtcacgggcgacaggcatggcttcgccgcccgcatatttgttgcaggtagaaatttcattttttctctcgtgatagtaattaacgttgagtgggataaatggtgatgtatacgtagccacaactaccaagcgtatcggcttcacaggtgagtccgttgtgatagagggtgacacagtgctgatggcggggggagagttctccgctggtgagtatcagctccagctgcttgagtatcaacggaaaggcctggtcgaggcgcaacgcatgctcgtcgctgaaagcaccgttaaacccggcgcggtccgcgagaaaatgcaggcggtcgccttcctgcaccagacgtgctccaaaacagggggtcatagcacgtttcagcccccattgctggcaggcgggattctccggtatggcaccggattctgagcgattgttcattattgttcctgattaaagtgaaggattaattgagagtaacgcttcgaagaatgacatagggaccattgcggtcctgacgacgttcagcaaacacggccagaacgccgtgtatgtcctgaacttcccggccagcataatggcagatactgcctgaccatttatatttgccagtacagaagcgaaacaggcgggagtcaggatgctgtcggtacagagccatggcctggcgcttactgatgattttcatatccagcctcgctcagcgaacgacacaatgccatcctggccgacaaccagatgatcgagcgtcttcacatcaaccagctccagtacctcctttagcctgtcagtcatctggcgatcggctttgctgggctccggatcgccggagggatggttatgtgcgagtacgacagctgcagcattgaaacgaagcgccgacttcaccacctcgcgggaatgaacctgcacatggtttaccgaaccggcgaacagtgtttcactctccagtaaacgatgctgattatcgagatagagcaccataaacacttcccgctcctgtccggccagctgtaaccgaagccagtcacgggcagcagtacttgaggtaaaggctattccaggctggcgcagatatttatcaagcaaattgatagcccggcggatggtccgtcgggcataaggtgtcaatccggatgtcgctgggagcaggcaaccatgccgggtcatagccgccagcggaaagagttcaggctgcgatgacagcggggataatgcggtattcatgtcaggcattcctcagtcgatgagatgcataatggcgctgcactctggatggtgtagcgcgaagtcacgtaagcgataatagtgctcagtcatcgcatcacattcggtacgacaggcgtggtggctgtatgtcatcagacaggcgactatccctgccgcttcgccagtaagttcagcgccgttgccgttcatgctgttgaacaatgcccacgtcttatcgtgctctgactcaggagccatgaaagcaccgccgttgctgagcgtcgaaaagttccagataccaccgtgataatcgacacacagacggctcatccaggcaaagattcggggctcaagggttatccattgtgggatggagccaaagtgctgcggccagaagccgatgcgtaactcgtcagggaccaccgaggcagtaattgctgcctgctcagcgaactcaaagttttgtgtattcattaaactatctccttatgccggagcggttgtttaacgcccgaaaaaatcgagcatattttctgccattacccacagggcgcgattgagcttcacatcgccatcaataccggtaacagcacgggtgcggctgcttttcccctgagcggttcgccctgacaatccccctttcatcaggttctcctgcacgcgctggtagactgtccacaggtcatcgctgtagtcctcccgacgacgcggagtcagcagctgcgataccgtgaccggctggtggtcttcgccaaagcgatatttcagcgcggcattcgccagcgcgtgacgggccggggctggcagcgccagtgactgcatcgcatcgcgcttctcctccacccggtcaaagaccccgagcacttcgtaagccccttcaatcaccttctcgacgacattgcctttatgcggtacccgcacttctccgaatgactggccgcagaccagaccattggtacagacgcctcgaaatagccccggcaacatctggtagcttgatgagccgtcatggctgttaagcagaatgatttccggcacctgatgtccggacagttgaccggcacgacgcaggcgaagcatgtgtttggtgtgctcccgcttgctctggtcccgaaccttcgtctggcaggcaaagaacggctcaaagccttcacgctgcaggctttcaaggatggtgatggtcgggatgtaggtgtacctgtctgaacgagattcatgtttgtcactcccgaacacgctggggacatgactcatcagctcttcgtaggtcagaggccggtcacggcgtatctggtttatacggccaaagcggctggctaatcgcatgggtaactccttatgcagtgggtaaaaagacaaaaggccacacttcccgaaagaggtgtggcctgactttgtttgtatcggtgatgtgctggtggtggttatgcaggaaatttgcggatgccataacgagtgatataccggttcagccagtaaccggcatccggctcaaagttccaggctcgccagaccatgcaacgctcatgacggacaaccagacggaaatgtgtccccaggtcgtcctctatagcaacgttggaatattgagacgcaaccgcctctgcctgctggcgagtaaacggtccatcaggcaattcagtgagttcagtcatacaggccccctaaaataaaaagcccctgtggcattagcgacaggggctgaatcaaacagatggcgaatcggctaagatgccttaccaccgacaaccgtgacttgtacaggtcggtagtactgcgggtcgaaaacggaaagtggcaggtcaatctggtaaccattacgctcttctgttgccttcatgatttcgacggagctaacgttttccacgcattcgttctccagcgaggcttcctgagagcgagtggcatcgctgtcgccaaatgcagccactgccatattccccatggccagcgtgtttccccctttatctttcagacgcagggaaagtgtcagaggcccgaatccttcaccacttccgccgttgtccaagcgaaactgccacacgcagacattgcccggcacccagaccatgtctgtgttgcggatgctgatgtaacgctgttcttcggcctgagccggtgaaagcagacaaaggctcagagcgaaaactgagataacgcctttcagcttcttcatggatttttctcctgattctccggcagatagagtttccccatttccttgccatcgtgcgaatacaccaccgatttttcacccgtgtagctgtcggtttcaatccggaagctcagggtgatattgtccgcaagacacagggcagcaatcagaggctgcaccgttttctgctgcatatccgcaatgtagtaataattgcctgactcacagccttccggcgactggttggttttcatcaccgtatattgcggtgtgccgaaagcatccttctttacccattcctgggcaatatcggatttatgcgagacaaccttgctgaacggtggcggagtcaggtccttaaaactggctatcgttttcacacccgcatcttccttgcggtcgcagccagaaacccccatggcaccgataaccatcaaaacagtgagaacaggtcgatacaatttcttcatggtgcagattccttattattcgtccgttccgttgcttcagcagttgccagttcgtcggcacaactcagccagactctgctgggctacccactgctgcagtttctgctctgaggcagaacgcttcgccgccagggcagcctgctgctgtttgttgacacagttttccgggaatgcagcaagtatctggttgctgtgaggttcctcagccagctccagctgatactgggtatcgatgatagtgaagtaacaccctttcccctggtcttcgccctgatagaccgatgtcaggtcggagtaataaccgctggcaggtttcagattcagcttgcgcacagtatgcgttttcttatcggcgagaaaataagcaccaccaccccgctgacgcagcaggaattgcctggtccagggataattgccaatcacactggcctgatagagcgtattgtttagcgtgtcgttatccatgccatcggccgacttccagccatccgcctgcatgtactgccagaatttgacggtacccacgacagtttcggcagacgtcggaaaggtagcgccagcgcagagactgacggccagtgccgttgtaatcagtaatttcttcatcatgattccttatgaggtaaaagaccgtcgccagttctggcgagcagtgagtgaaaaacgtgaaaatgaggaagggctctgagtaattccggttcggcgagaacgttacgaatctgaaggtcgggcacgaacagttccgggtgcaaggtaaccgcatggatatcgttcagcggaaacactgccacgcgatgatgatgctcgccagtcagataccaatgcccgccgcagagtacgaggcggtatggtgcaagccctgagcaacgacaaccttcagccagcagcgtcacgcgacgatgctctgatatagccctgacaaggcgtgtaaatatgcctggcctgggtggcgacaatgactccgattctgcccatatgaggcacggagactcaccgggcccactcagcagtgagctgaccatgtggttatccatgtcaggaaacaaggcctccacacctgactgacgagcaaaagtcagcaccgccagttcgcgctgatggctacctgaaagcagacgacaggtgccgtcgcgatattccaggtccaggtacatcagtcgctcacgaaaatcccggcggagggtacggagcgatacaccaaactctgcggcaagaaggcccatatccagtgtttcgccagcaacaaggcggctgataatgagggacagccgaaccgccagccgctcatggcgacgctcagtctgggacattagattttctccatcccgttaacaggctgaaaattaagtgattagtgtaacgaaggggtcggacagggtatggacatgggaaggcgtattttttcagtgcgaggattacagttgtaatgcgcctttacgcgttgaaggtgtattaatcgctcattaattgagcacaaaaaggacaggaagtgtccgctatacgcggtttttcagaagaaaatccagtcccagacggcacgggcaacggtcaccacggcttcccgcacggttcgaatcacagcccttacaggcgctggcagaaaagatgatgactccacattgccaatcatttcatcaactgcatgaccaaagcgctcacgtgcctgcttttttaccggctcggtgcagagccttccatgcagttgtgttgtcagtggactggtggcccggtcaggcaggctatgcatcatagtatcgacaagggtttccacgccccaccctgtgcgggctgacaccacacagacaggatggtgcggcaggaacaactgctgcatcgcgattctcttagtctcaatcgttaactgctgagcaggtgaaggcgtgctatcggtggtacaccattcatgacagggttcggccttgtcgacctgattaaccacgaacaaaacccggtactgatacgccagcatcaccttgcgatagaagtgttcatccactgacagtgcccgatcatcagccttgatgacccataacactaaatccagttcgggtaggatgcggcgatacagtgcagtgtattcttcatcgcgttgctcgctttcacccacaccaggtaaatcaacaatcatcaggctgtgattgccattgcggagcctgaagcgcagcacatcgcgggtgcaggcctccacatcgctgaccgacgtgacttctccctggaacagggcattgcagagagacgatttgcctgccccacttttgcccataatgccaataaccggctcgtactgtgtgagactacgaaggcgtttaagaattagactgcgaagagtatggggcagtgaagccagaggcttctcaatggccagaaggccgtcagatttttgcataaggagatctcagcgcgaaaaataaaaagacccgcgatccggtaaaggatgcggggattcacgaggataatatctatctgaaattatttggattgaatgctatttatcttctgtatatctggcatcgtgccaggcattcataatgataacttccagctcttcgttaatttttcgaccatttttctttgccagcatatcgagcttttctttaatgtccttctggacataagtgttaatcacttttttgtcagcaatgttttcccggaacaaattctggttgtatgtttttttcatccgttgaatcatcagacgccgagtgtcagggtgagcaggccaggaatacaatactgctgtgagaaaagtaatcacttgttgttgtctgatttcagtcataaatgaaggcatgtaatcgggtttgatatgctccataacatatttaaaagcccatgcacattgtttatggtttttaaggtcaatccatttaaatggttctggtaactctcgatttcgctgaatccagatattttttaatgatgagagtgttttgatcttaaagaataaatcgacatcccagctatcaaaacaggtgtagagtactgaaagggcatccttatacgtttccggaataacaggcaataagttatgctgaatgaccggaggccgttcacggtaaaaatcaacctctagtggattaatttccttagggcccatggttgaaagtatattccatgcaaaataagcggagctatagtcctttatccattcaaaatttgtctccgggatgatgctggaaaataatccatttttcatttcccgtacgaacttattgtactcatgagtgtttttaaattcattattaaggtctctcaggatcatatccataacctcctgatttttataatcagttatgaggagtagcggagtgcgctcccggtatccttcgatgtttttcttcatgtattcgatataaaaccggcacgctctttctgttctgtccgtcagctgttctttcataattacattttcattgattttaaagtgggtatcactacgtaggttaatgcgtgtgtaatgcgtagtcaaatgcgttgctttctgcgtcaatatctgcgtaataaaaagtgtagtgaaagttatgttttatgtaatgtgtagtgattcgggattagctggttttcaatgtaaaacaacaggataagctgctcactgaccttcgggaaagtaagaagggctttttcaaaggacaggtagtccggtgactataagcccatgaagacaaaagaggaaggatgacggttacctgagcgattgatgtctgcaacagatgaggtaacggaagaatgtaagacagtcatgcacatgagcgcgtcgaaatacatctcagaaccggttgacccctagaggtcaacataacccgctttttttacgtatctccccatgggtatgccccggagcagtgaccgcaattaaatatcactcatccgggttacctttcttaaccggagataccaaatcatgaccacgcatcccttacttaccgaagaccagttgattgacatggcatttattaccagcctgctgcagatgacagacaagtggatttacaagcttattaaggacggatccttccccaaacctatcaagctggggcgaagctcccgatggcggaagagcgaggtggagtcctggcttcaggaacgtgtcgaccagtcccgtaaataatctcccgccagactaaaccctcagcagaataataactatccggttgcaccggaggttttctgctgtctgtcatttaagccagaaggaatatgaaccatgaaagattacaagcctcgttacgaagagctttataaatattaccagatctggttgaccgattttacgaagctgacggtcagatcgggtatgtgccaccaaaacatctaccaccatcataccctgacggttggcagccttaagtttccgggagaggaagaggttattgctattgtcccccagtgcctgcaccggattatttatggtagagcagcagccccactgactgttaatgaagacctgagcgtcagtttatttacccaggagcatctgctggctcaccatcccatgctggaggggattttgctgtctgagtgcgtgcgtttaaaacaacgcccactggcaaataagctcatcagtttgttccgccaattcagcggtagtgagctgcgtctgaagctggtctggctgtgctggtacgatttgatgctggggaattgccttgatgactggaccgacaacctcaggttcaaaaaagacaaagaaatggatatctggatcaatgaccggcaggctgaaaaccctgcgctgaccagtctgatggacgagtatgtctgctttgcatggcggacgacagctgaaccactgagttaggcttcatccatagtcctgcaagggatttgagggttattggggagtgaaaattaatttaggttaattaatataattaataggcactccctttttacaaccatccctcaatccatgcagttcccccagccatggcccttcctgaaggcctggtgtattccactggctggccctcgccagcgctaaagaaactcatcctatgcaaaataatcaacgatgggagccagactggtttctacagtcactcctgaacaaccatatcgacaaactggtagagcgctattcctgcctgcgggcattccgaatagatctgttttaccaggatcataccgctaagtatttcctgcgggatcaccagcagctcggatgggatatccgaaagctgatgaaccatgtgatgcaactcgaagcgatggtcggtttcttctgggttatcgaatggacagaagaccatcactatcatgcccatgtcgtgttctggctggatggtagtaaaactcagaatacctatccttgggcgcagcaggtcggtttgtactggagtgatatcactgaccgggatggctggtatcaccggtgtgagtttaaagagcattacgaagccaacatcaacattccggtacgttacagcgacccggacagtatcaccaacatccgtcaggtactggcgtatatgaccaaaattcaacaaaaagaggggatgccgttgtttggttgcaacgaagttccaccccgcccaccgacaggtcggccacgacgcaatctctgagagttttttacgtcacaacgccttagtgtgacaaccaaagaacagtaacgacagtccacacgggcttacttcgcttcctttgataacacttaactaatccgccattcactcactgactatgctgcccgtaccgggacggctgacgcctgtgtgttgtctggcggtaaggagctgtactatgtacgccaaatctttcctcgctctcgacgggaatggtcgtctgaccggtgcccgtactgcgcagaccgccccttacgatcgttatacctgccacctctgcggtagcgtgctgcaataccatcctgaatacatcaacgaacgcccgtggtttgaacaccggcccgacgatctaacggagaacgggcgacagcactgcccgtatgtaaatccagtggaaaaggaagtaagacgaattcttaagttgcgccgttacgtggcggatgctcaacccgtgatactcaggactgactggcactgtagcggctgcggcaacaattaccacggtgaacgttattgcgtggcatgtggtactggcgacttaagccatatactggaagaggccccacgatgagaatgctgcttatcgttgacttcacaaaacctgcactgatcttttcgattaatgaatatcactcatagtcccaatcctcctgcctgtgattatcagcgagcacaaacccgttaacatccccctatctcttcatgctcaacggattaccatgcttaatcaacaggcacgaactcactcaactacagtaaaaaaaactggtctatcatttttgctcattctgagcgccctaatggctgttacctctttatcaaccgacatttatcttccggctatgcccgtcatggcaaaggatttacagggtgaagcagagctgacaatcacagggttccttatcggtttttgcattgcacaactgatttggggaccgattagcgatcgttatggtcgtcgactgccgctgtttatcggtttaggtctgttcatcgtcggctcggtgggctgcgcgttatcaacggatatcgtgcaaatagtcttctggcgtgtttttcaggcgttaggtgcctgtaccgggccgatgctggctcgagcaatgatccgtgacctgtttagccgcactcgtgcagcacaaatgctttcgactctgatgataattatggccatcgcgccgattgccgggcccctgatcggtgggcagatgattaaagtcacctcgtggcatgccattttctggctgctggcgattatcggagcattaatgctgatgtctttattctggctaccggagacattacctgctgaaaaacgctcacaagcctccgtaatcaaagcttttcacaactactatgccttgctcaccaacgccagatacatgcggtttactttgtgcctgacgttctattacgtcgctgcctatgcgtttatcacgggttccccgtttgtgtacatcacgtacttcggcgttgacccgcagcattacggttggctgtttgcagtaaacattgttggactgatggcggtgagcatggtcaacagacgtctggttcaccgctatccactggaagcgttgctcaggaatgccgtattcatcgccgctattgcggcaatagtgctggcagtcaccaccggcctgggcgtaggtggaattaccgtgattgtcggcgctgtgttcgtgttcttctctatgaatggcatcatcgcggcgacatccacggcttgcgctctggacgcagtgcctaatgtggctggctccgcatcggcgctaatgggcgcgttacaatacggcagcggcatcatctcttcacttcttcttgccctgttcagtgatggcacaccatggacgttgggctggataattgcgttgtttacagcagccagcgccctgatggcactgaccgttcagataaagaaataaaacgtcgttattgatgccagacgacactttcgtccagagatacccgcccttccctgtaactcagggagggatgcgttttatctgggatccccaatgaaataccgtaaagcagcctgaaaccttcaggaacattcaatagcctacgcaccgtttgggcaaaataactcagcactgcctgtggaacacctgcgtaaccgcgagctgccagagaaagcaggaatgtctgcgcatacataccggcgtctgaggctacgcgaacgttgtcccctacagcaggaatgaatagcagggcaacatgaggcgcgccgaaaaatctcacattacgctcgaccacttctgagcgacttaagttatccccccgcgcaacgcccagtgcctgatagtacgagcgcccctgctccgaagcccgttgcctgaatggctagggataagcttctttatcaaacgtaaaatcaaggctgtagttcccagccctcagatcttccgtcagtgcgtggcttaattcacgaagtttatctcctgcaacaatatgcagggtccagggttgagtattgcagttggatggtgcgcattgcgcttcgagcaaaatgtctttgaggatatcgctggggatgggagatggaagaaaggctctagccgagtatctgttttttactacctcactaaatgttggctcttgcgtactcatttgcttctccgcctgaaagtaatttgaagtgaatgattcactctctcccgatccatcctgtcacatcaggcccatcgttttcattcccggttccagattaggtctatgaattccattcatagcgtctatttaagcagcgtaattatctttaaccccaacttcgttaatctgggtctatcgcgtgaacacgcaagcggaaaatggctacagctgatggatataccccagcctgcgcggctggggcgtcattggaggctaactaaatatttttatcgaagaagacgtctaacttttgcattgccttatcaacatattttggcacccaatacgtttcgatatgggtagcgccatcgatcaggaagagttctttgtccttcgtaccggtggcttttgcgaacgcatcttcagtcatatagagcgtatccgcttttgtaccggcaatcatcagcagcggtttattgatgagattgatatggtccgttacgtcaaagctcatcaaatccagcagactgctggtggtgtatttaaacgtggagttcgggtgggcgtgggttttccagtagtactcgtagccctgacgatataaggcaaaaggtaatttagcaatctgttcatcagtcaggttggcatcgccggagtaaagcacttctcctcctgcagcttcctgagcgcgtgcctcagaagcctgctgaagacgctgctggatagtatcgagctgtgaatcctgcataccgttgcggcgcacaaggcctgaattaaacatgctgatggttgcgatcgatttgaatcgtttatcagtttcggcggcaacaagtgaatacccgccacctccgcaaatgccaagcagaccgaggcgggaagtatcaacgcccggatactggctgatgtaatcagccatgccatgaacatcctcgatgcggttagcgggtttatccacgctgcgaggcatcccaccgctagcgccctgataagccgcatcggcggtaatcgtgatgtagccctgttcggcgagacgctgggcatacaacccggcgacctgttcttttacgccgccattaggatgtgccaccactacagcagggtattttttggcgggatcgtagttagcaggggtatagacattcgcagcaatctggatgccatgcagatcgtatttcacggggtgaatgttgaccttgcctttgacgttctcagtaatggcaccgtcataggccagtgtgaatggattttttttgtaatcagccgcattgactgaggtcactccagccattgccgtgagtagcattgcactgataagcgtgaatttcatggtctctcccgatgagtgtcggcctggttattcaggctcgcggaatcaaatttgcaggctcagattaggcggagagggctgtcagcatcgtgacagggaaataacatttttgtcaggaaacagactggaatgggtaagagttcctgacaacgctgtcaggtaaccgtcagctttatgttggcaatcaggaggcagaatggtctctcttaaatgagattcatgttcagttttctgagaaaaggagcgatcaatgaaaagacagaatgccccaacaatgccagagcggcgcaagctattagtcgccggggcgggtattgccgccgcctcgctgattccgcacgtatcggcggcgagccaaacctctcaggtcgattcatccagacaaaccagccaacgcaatgctgctccgggcaagcgtaaactcgggaagctggaagtttctgccgtcggtttgggtgtccagaacatgagccgaaaatacgacacgtccgttccctggcgtcccgagatgatcaatgttatccacggggcatttgatgaaggggtaacgttcttcgatgctgctgaagcctacggcccatttgaagtcgaaaaaatcctcggggaaggcgtcgccccattcagggacaaaatcgttatcgccaccaagtttggctggaacattgaccaacagacgggtaaacgtctgccgggccttaacagcaggccggagcatatcagacaggtcgtcgagaacatgctcaaacgcctgcgtaccgatcgtatcgatttactgtatcagcaccgggttgatccgcagatcccaatcgaagatgtcgccggtgtggttaaagatttaatggatcaagggaaagttctgcactggggtctgtctgaaatgggcatcaacacgttgagacgcgcccatgcagcattacccgttaccgccgtacaaagtgaatactccatgctctggcgcggccccgaaaagcaggtacttccggtgtgtgaagagctgggcattggattcgtgccatggagcccgctcggcgtgcaatttttaacgggctggattgatgagaatacccggttcgctgccggtgatttccgcgcgacagaaacgcgcttctcgcctgataacctgccacacaacttacagctggtagcgctactgaaatcctgggcaataagaaaaaatgccgcaccgggtcagattgcgctggcatggctcctggcccgtaaaccctggatagttcccatccctggcaccaccaataaagaccatatgctgcaaaacacagcggctaccggcgtgtcgctgaattccgcagaattgaccgcgctcacccgctcactggatgccatcactattcagggtcaacgtctgccggatgccgtgcaggtttattccgatgttgaagcaccgttgaaaagttaagaggaagtcccgttatgcgcctgttgttagtcgaagatgaagaaaaaacgtcaacctatctcaaccgtgcgttgagtgagtccggatttacggtagatgtctctgcagatggagctgaaggtcttcattacgcgctggagttcgactacgacgcgataatccttgatgtaatgttgccggggatggatggatatcgggtacttgagggtgtgcgagcagtcaaacagacgccggtgctgatgctctctgcacggggttcagtcgacgagcgcgtaaaagggctccgacttggtgctgatgattatcttccaaaacccttttcacttattgagctggtagcgcgcattcaggctctggtgcggcgccgtgcaacggatggagcagatatcacgcaactgcaaattcacgatctgcatctggatctgctggctcgccgggtattccgcgccggaacaaggctggaactgacagcgaaagagttttccttgctgagccttctggcccggcatcagggggagattctgtcaaaaatgatgattgcggagcagatatgggacatgaattttgacagcgatgccaacgtggttgaagtggccattaaacgacttcgggccaaagtggatgctccgttcgatatcaaactactgcataccgttcgtggcatggggtatgtccttgaagtgcggtccgaataaatgaaggggataagcatgcctgagcgttccatctccgttcacctggcgctgatgtttgccttatccgcgctgctgattgtatccgttatcggtatcctgcttagaagctctttgcatgattctttgcaaaagcagatgcacaacgaactgttgttccgggaatcattaatgagtccgtggatcaccgcacgaacctcggctgacggctggtcactgcttgccaataaattcaccgtgttaaccaattctgaaggtgaacgcgttcgctactggatagtgagcgataacccgcacttcagtatgggggggacaccaccagtgggtgttcagtggtcttctttgcaggaaggttttaataaagtgcccggtgcatcggaaggtgcatgctcgctgttcctgctagtgaaaactatccccgccaacggtgagcggcctgagttgcgctatgtggttgccatcgactccacgccgtacatgggcacactcgatgcgttcacgcgtacattgctgatcattaccgcgctgggcgtcgtcattgtcgccttactgggatacgtcgtctcaaggatcggtcttcgtcccgttggggcgctcagtaaacaggcccggcatcttgctccagggaaccatggccagcgcctgaataccgaagcattacctgacgaattacagcaattagcatcatcttttaatggtgtgctggaacggcaagagatcgcctggcgacagctcgaaagctttaatgccgatgttgcgcatgaactccgtacaccgctgacaaaccttatcggccagacgcaactgggtctctcgcgccgacgttcgcaggatgaactggaagagttattgggttccaatctggaagaacttgaacgcatgacttcgatagttaacgacatgctgttcctgtcccatgctcacgcgggtgaacatgcttcccagcttacgcaggtttccctgcgggaagaaaccctgaaaacagcggagtacgttgaaccctcgtttgctgaaaaacagctctctctggatgttgagggcgacgtcactgcgcacattgaccggcgactgttccaccgatcgctggctaatttgctggaaaacagcgcaagacactcaccattcaatagaacggttacggtacgcttaagcgaaaaaaacaatcaagcctgtgttgaagtttcaaacccgggcgatccgatagcatcagagcacttacaccggcttttcgagcggttctatcgcgttgacaactcccgagccaggagtgatacccatcatgggctgggcctgtcgatcgtgcgtgccgtcgctattatgcaccggggagatgtctttgcccgtagtgaaggcggcatcaatacatttggcctcacctttgcgatacaagcggataaagcggcgggcaatgctcaatccggcgctgagccgggacccgggttaactgacagaattgtcaggggggcgtcagcctgacgtcattactccctcgataaaatcatcgcaggcaatcccctcttcattgataaggacgctttgcatgatcggacatttacgttacctcgggctgttactgcccctcttcacattttcatcctgggcagcggagcaaaatcccgctgtcaatatcgcacccgcaggaagtcagaacgcggtgtacgggccagccgagaactttaccggtcgcgtcagggttgatcctctcttcaaaccggataacgacatccctgtttccggggcttatgtcacgtttgaacccggcgctcgttccgcctggcatatgcatccggcaggtcagcggctgattgtgacctctggtgttgggctcacccaacaagaagggcagccggtgcaggttatccgcgccggtgacgttgtctcttgccccgcaggggtcaaacactggcacggggcggctcccggcagtgcgatgacgcatctggcgataaccgggattgtggatggcaaaagcgttaactggatggagaaagtgacagatgaacaataccacgcccattaaagcattagcggcagcggtactgctgacctttggttttggcctcgcggcaaatgctgcccccgtcaataaaggagcctcagacatgaaccacgaacaatcggtttcagatatgctgtcagcccgccaacaggccatcccgttgattgccgcatcgatggccagcagtcagatagataagctgaatgcagccctgaatcagggtcttgacgcaggactcacgataaacgaaaccaaagagattctcgtccagctctatgcctacacgggcttccctcgtagcctgaatgcgcttagtgaactgatgaaggtcgtcgaagcacgtaaacaacgtggcatcgaagacgttgagggtaaagaaccggttgccccgatccctgtcggggatgagcttcgccgtgtcggtaccgcaaaccagacgaaaatctctggcgctcccgtccagggcccgctgtttgattttaccccggtcattaaccagttcctgcaaacgcaccttttcggcgacattttcgcccgcgataacctcgactggcaaagccgcgagctggcaacggttggcgcattagcggccacgccgggcgtcgaatcacaactgctgtcgcatacgcgagccagcatgcgggtcggcctgacggcagcgcagctgcgccagctggcacaggttctgcgtgaagatggcgaaagtgatgcagcaacgcgagctgaaaaggcgctgcagcaggcgctcgcaaacaattaggagtgggttatggagcatgatcccaaccgcagaatgttaatcaccgcacttgccgggctcacactggcgaacgtttcttttgcctcagctgcgaccggaaccgcaaacgagcagggtaaaagccgtgttctggtggcgtacttttcccgcagcggaaatacacgggtgattgcgggcgtcattcaccgcagcctgaataccgatctgtttgaaatcgaaccggctacgccttatccggaagactattttcagaccgttgaacaggcgaaaaaagagcgtgagcgaggcgtaaaaccggcattaaaaaatagcgttgcagatacctcacgctacgagaccgtgtatttaggctttccgatctgggggaccagcgtgccgcctgtagtgcaagcatttctcagcagccacaaccttgcgggcaaattactcatcccctttattactcacggtggctacggtaaaggagacagcgacgacatccttgccagtctcgccccaactgcgcgtcgggaaaaaccgctggtcattgaatgcgaccaggagcgaagaaccactgaaacggtaacaagttggttagagacaatacgcagttaatcgtccgcattcatgagtctgccaaataagggcaatcaggggtgctaaataattaacgctgactactcagatatgattgagcggcaaacataacagaggatgtaatcttgaagacaatcttaaaaacgctggccatctgcgtaatggcgggcggcctggtggctcagtcggtctatgccgagccgctggtcattcaggaacagggaagcttttctgctggtggcactatcatcaccgcaccaggaacatttgatgcaaaaaagccgctggattcagctggccaaacctatcatggcgatcatgcctcagtgttctaccaaatcccggagaatccgcataaataccctatcgtcatgctgcacggcgcaggtcagttctcccgtacctgggaaagtaccccggatggtcgcgaagggttccagaacatcttcctgcgtcgcgggttctcaacttatcttgtcgatcagccgcgtcggggcagcgccgggcgcacgactgtagaaggtactgttacgcctaaaccggatgaacaaatgtggttcaaccagttccgcgttggcgtgtggccagagtattttaaaggtgttcagttttctcacgacaaagaagcactgaatcagtatttccgtcagatgaccccaaataccgggccgtttgatatcaatgtcatctctgatgcgatgtccgccgtcgtggataaatccggcccggctatcctcttcacccactctcagggtggtggaccgggctggtacacggcgatgaaaaacaacaaggtcaaagccattgtcgccttcgagcctggcagcagctttgtcttcccggaaaaagaactcccagcccctatgccaagcgcgttcgacacgctgaagggtgagcctgtgccaatggagcagtttatggcactgaccaaaatcccgattctgattatttacggcgataacataccggataaaccggtagccatgcccgcgcaggacagctggcgcgtacgtctggcgatggcccgcgagtggcgtgacgtggtgaacaagcatggcggggatgttacggtgacgcatctgcctgaagtgggaatcaaagggaatacccacttcccgttctctgatttaaataatgtgcaggttgctgatttggttagtaaatttttgaaggaaaaagatctgcaatagagaaagctagtattgagccttcatgaatgaaggctcaatacaaacatcagttttatcaaaaaaataaaatggggacgagaaggtcggctttgagcgaaaaacggaccttcaaatccgaaccggtttaattgattaaccttggctgtcagtcaacccatcgttagcatgaatccgatcgaaaattccttatcgcattttttacaaatacgcagtggcaagaaagatagactctggctcgtgacaagtagagttgttcatttgtataaagagacttcgccttcaggacgcgttttgaacctgcgatgcatccacaggtattgctcaggggcacggagaatttcacgctcgatgatcttgttcatataagccgctgcggcgaccttgtcttcccctggatagcctgacaacggattgctgatatacatgtgataaccttttttatcgctacgtcgaatcatgctaagtgtgatcaagtgtgcaccagcgagttttgacagagcatacgttccgttcgtcgtggctgctttttttaccgagaaaaaaggtgcaaaaacgcttcccttagacccataatcctggtctggtgcaaaccacacggcttcaccggctttcagcgcatgaacaaaaccagataaattacgtcgatcaatcatcgctttatttgaacgcatacgcccttttgtctgcacccattccattaatggattattgtgtgggcgataagttgccatcataggatgacataaacccattactcttccacacaattcaagggacataaaatgaataccgacaactattactcctctggtcgcaccggtcaggttttcaagcccttcgacatcaaaccattttttgactctcacatcgctccagaaccaggccattcctgtttccatcagtcccagcccgagagaaacaaagtttttattgaccatctggctccgggaaaatggtgtcatctcgggaaagcagagttcgatatttctaatcgcaattccttcccggcgtttcagaaagggtctggatatttttccaaggccagagcccagaatgtgtaaaaccgggtaaggaagttgaacgagaagccacagcagacccaaaccagaccaggtaagccagtagcgaggatggagtaaattatgagtaaaagtctgtgccataaatttccttaatgctaatgaaggttataacgcaaaaggaaaataatgagaaaattcgtctttagcgatacattttgttttagacagtttaaatctgtctaaattcagaaaaacaaataattttgcaattactggtaaaggattttaagagtcaggaatgaattgtaagccagcaaagttatgccgtcacaaattcatgggcttatcattgatattcaagaaattgtcttcttgattcatcatcctcaaggtactcaaaagaaagaaggcgaattttggtaagtttatagaaccactcgcaatcgtttcgttgaataatttcgcctggtttgaaacatatgcctgatacttcccggataatcgcatatttgccattactaaacctgaccctgtggatacagaaaggttgaccggcctgcccatgacagcttttcgaaaggatatgcccttcaataaaaacagattttttagatttcatcatcatgccctcgacaactgcagtacaggagaaatgttgtcatttcccgacatcatttacgttaagtggcagaagctgatcagccgccgatacaccagcattctgatggtttgaacaacagtccgcaggcagggcactccagaactgcatcttttcttagtttacctgctttctgatcagctctgtatgcgcataccgggcaggcaacatgaaccgacctttctttaaagtgcctgagtccttttgtataagacataaataattctctgagggatacagtaattattatacgctttaatataaaaataactggcttaagttatgttaaattatgactaaatcaagatatcagatattgaaaattgaacgtctgatttatgatacaataccctacccttccgtgagaaatttatgatgaaatcagaagacacccttgactggtacccggcacagctaccgccagtgaaaattattcttggcgaagccgtgctggctgtgggtaaacagggccgaccgattaatacccgaaccttgctggaataccttcaggtcatgcaggacaaacaaaaaagaaaggatgacaaaatcgctatgcagactgcgattgatgttctcagggataatcagcgcattaacggcagacgttaatgcgcctccgggatcgtgtcagttctgaatgatctcaaccgtatggttttgtccatcatcctgcagcggtattctgtcatcagggaggagaacaccatccagtgtcacgcgatattttacgttgccgcgtgagacacttatctgataatggctttcgccatattgataggccatagaaaaagacggccactcatccggtaaccgggcatgaacactaaagtcagtaccggaacgttttatccccagtaattcctcagtaagtaaacgccaggcccagcctgcggaaccggtataccagctccatcctgcacgtccggtatggggagcgacgctgtagacatcagcactcatgacataaggctcagctttataaatcccgaccaagcccgcattcagagtatgatttatagggttgagcattgaccagagttgccaggcacgtttggcattccccatccgggaaaatgccatcacggcccagatggcgccatgagtatactgccctccgttttcccgcacaccgggcaggtacccctgtatgtaacccggatttggaccgtgtccatcaaaaggaggcgttaacagtttgatcagtcccccttcgttatccacaaggtgcttatccagcgcctgcatggcctttgtgcaccgtcccgggctcgcggccccggacaatacagaccagctttgcgcaatcgcatcaatccggcagtcctgtgaggctttcgaccccaggggagtaccatcgtcaaaatatccgcgccggtaccattcactatcccaggcgtgggcttcgagattgctttgcaggcgcagagcctgtgaacggcacatcgaggcgatactttcatccagccggcgctccgccagcgcggcaaaccgttgcaaaatgtcgtacaggaagaagcccagccagacgctttcgcctttgccttcgatacccacccggttcatcccgtcattccagtcaccagcccccatcagcggcaggccatgttccccgaaccgcagcccatgtcgaatagctttgacgcagtgtaaccagagtgtctcttcggtgccgctgatgaccggcgtgtcatagacagactcttcaccaggctgaagcgagcgtccctccagataaggaacgcgtatttccagtgcatccatatcccctgtcgtttccacatagtggcaaacggcaagcggcagccaaagatagtcatcggaacagcgggtacgcacgccgttgccgtgtggtgggtgccaccagtgctgcacatccccctcgataaactgccgtgatgcacagagtattatctgttcacgcatccggtccggagcagcgtggctcagagccagcgtatcctgcagctgatcgcgaaaaccaaatgcaccgccagactgatagtagccactccgggccataagacggcaggcgaccgtctgataaagcagccaaccattaaccagtaaatttacggacgtgtcgggggtattaactacgattttatcgagaacattgtgccagtgattatgaatccggttcagctcctggcggaccgtatcctcgttcatgtagcgggccagcgtctcctgagcacaaacatcattctcctctgcgccgaggataaaaataaacgtcctctggtccccgtcaattaatgtaaccgccgattgcaccgctccgcagggatccagaccggcccccgtcttaccagaaagcttttgcagtttcatggccgaaggggcgtgaagggaaccattacggccaataaactcccggcgatcccctgtcagagaacagtcattaccgctgacggcaaaaaatgcagttcggccgccaccattatcaccataaaagttattcgcaagcaccccgcagccaccgggcgttctggccacatgtgtcacaatgtgaggggctgagcgcgttcgtgtttctccgagcgtccactctacatagcctgtgacggaaagttgacgtgtccgtcccgaggagttactgagcgtcaggagcaccagtttaaccggatcttcttcagcaaccaggaccgtcaactcgctgtctataccactctcacgatgggcaaatacgctgtagccaaaaccatggcgggtcaggtagtcaccgtgtccgcgaacaggtaaagccgtcggcgaccagcactccccgctctcttcatcgcgcaggtaaaatgcctcgccgctgcgatcgctcaccggatcgttctcccacggcgtcaaccggtattcatgggcattctcataccaggtataggcctgccctgcctctgagatcacactgccaaaacgagaatttgccagtatgttcgaccagggagccggtgtaagcgcattttcccgaaggacgatctgatactcccgcccatcctgagaaaatccaccgtacccattgaaatggcataactgactggtatcagggctccagtccgtatgttgattacgctcgcgcacagcacgcggaatgaatgcccttgccggcgatttcagggtatgaatacgctggttaagctgctcattaataccccctgcgcggtcatcaagataaagacaggccacgctcatcaaaagcaacttatcctcagcggagagatgctcaccgttccggacaaaaagcccgccctttttatccagcagactggcttcagacccggcataaattaactccataatctgattttgtaatccctgctggtagccgccggggctgttattcaggataaccaaatcaacatccagccctttctgtctccagtaacggtgtgcctgaatcagtgtggtcactgaggtgatactttcctcgctggttatactcagcagcactatcggcagatcccctgaaattgcccagccccacagtccggactggccacgccggttgcggcctatcgcctggccttcggcgcgcagctcctggacagggtaaagcacagcgctggcgagactattgaacaacgtggcatcatcttcactggcgttcatctggcgcaataccaccagactgtgagaccaggccagttcaaagacgcgatcggcaatagggtaatcgcgatatttctccagcaacgccaggctctgctgacgggtctcgctgatgccataaatgatatcaatcgtaaccggctgccctggctgcagaatgatggcgttgcgaattgccagtatcggatccagcaccgagcccgacgtgttgcctagcatccctcccgtctctattgcctgtgcattcgcagggtttctgccacgtccaataaaccttgccctgtccgtttcaaacgacacgttatgtcggttatcgccgtgcaccaccatcatgtgaaacaggcaagggcccggttcatccggtgagcgcgggcgccggtggcaaagaatagcgtcacgctcaggagccagctcagtctgaataaacaaattgctgaatgccgggtgtgccagatcgctggcatcaggtgccagtaccacttcagcataggttgtcagctccagagagcgaggcttacgaccacgatgaatcagtgtgagccgtcgcaattcaacatcatcctccggagagatcaccacctgagttttgacgctgagtccccctaagcttcgtctgaattctgcccccgcatcggtgaacaacacttcctcgtcttgtccgctggtgtagcctgttggttgccaagtattgctccacacatctcccgtctgggtatcgcggatgtagcagaatgctccccagttatcacgggtggtatcactgcgccagcgcgttagtgcaatatcattccagcgactgtaaccaccgccgcccgcggtcaacatcagatgataatggccgttggacaggagttgaatatccggggagggggtatccacgctatagaaaatacggggttcatagcgaacgggtttgaccatgccctcatgagattcaaaatgacggcgcggactgtacagatcgaccgcatccggcacgcgctcctgtaacagcagactcgctgaccggaataccgtgctggacataaagcgttcagtcatgggggcgtcaagcagcacatgagccagcgcctgaaatgccataccctggtgatgcgccatccaggactgtaccaccgcatagagctgaccggttgcaagacgtgagggggtatagtccagcgcttcataaaaaccgtattctccgcgtgcaccatttttttgcagcctgaacaggttctcacaggctctctgtggggaaaccatcagcgccagcagcgtggcgtaaggagcaacaaccatgtcatcggcaagtcccctgcgtagaccgagccccggtacgccaaatgcctgatactgataattatgctgaacatcaaaagcatgatagccagactctgaaacaccccatggtaccccgcgttctttcccccaatgaatctggcgcataaccgccgactgactcatttcatcgagcaggctgccgggccaggtgggcatcaccagattcggcatcagatattcaaacatggatccgctccatgacatcagggcagtttcattatcaatcgtggtaaacaatcgacccagcgcgtaccagcttttaagaggcagctgattagtcgcaatggcaagaaaactggtcaggcggatttcagacggcaggagatcgtagtggcttttgtcaggcatattggtgtcacagttataaccgacgctgagcagactggttgcttcactgtacagaaaggcgaaatccatccgggcatgctcatccagccgctgttccagctcggtgataatattgagtcgcattcgggcctgctccgccactgacgccggaggcgttcctgtaccggttaatgtcggacgggcaagctcgctcagcgtcggcagcgtctgttcattccaggatgcaggcaaccagccaagcaacagagaccactcatggcaaagctgaaccagttgatgctccagatgtccagcccagcgcatctgaagaggagatccctgatgacatgcgctggtcagatggttgcactgggtgcgcatgcttttcagttcgctgaaaagcgcctgcggagagagcgacacagcgttcaggcaatgcttgcgcagcagtctcaggctgtcaggtgggttcttaccccactgtttttccagaatatccagcgtatcgttcagtcctgccagtatctgttggttgcttaaaacaggctgatgacgcatggcggacaggcctgcacgcagggtcaataaatgcccggccatattgccgctgtcgacgctggagatatagcgtggacttaggggggccagcgtacgggtgtcataccagttgtagagatggccccggtagtgctccattttatccatcgtgtcgagcgtgagcgacacgcgccggagcacctctccgccaggcaggtagccaaagtcccatgccgtcaggttagccataagtgaaagaccaatattggtaggagaagttcggtgtgccaccgtcggttgtggtatttcctgataattatcaggcggaagccagttctcttttgctgtggcaaatgtttcaaaaaaagcccagatttcacggcttgtctggcgtaacagctgtttttgttcctgattaggcgaaaaaaccttacgcacgggctggcgactcagccagctcatcagcagcggtgccacacaccataccaaaccgatcggtaacgcaatccccagcagctgtggggcaaattgtccggtcagtattgtcagcgccacgccaccggcaacgttcagccacatcgcctgataaaaacgtgcaacagtgggtctggcctgactgctgtcctggctgtggctgacccactggctgaggtgacgcctgcttatccccagtcgccatagcgtcacggcgatcgctttcagcgaatatccggcttcgtgcggcagtatcgcaaaattaaggctgatacctgacagacgctttagcgcgcccgcccccaccattaacagatgcggcttcacgcggcgacgcagaggtttatgcagaaggtcgtggctgatgcagaggatggctggcaacagccatatcagcaacagtatgcccagccagtaaaccgggttgggtacccaaagcagagcgaagaacagcaatatcagtaaggagggggcgaccagactgcgacgtagattatcgagtaatttccagtaagaaagcgcggtcagcggattcctgacccgggttccatcggcttttctgacgcgtggttttagccagttaagcagttgccagtcaccccggatccagcgtgaacgtcgtgcaacatccgacagataattattagggtactgttcgtacagtaacacctcgctcagcagacccgaacgtgcatagcatccttcaagcagatcgtggctgagtaccagattttccgggcagatgttggtagtggcctgcataaaaatatcaacatcgtaaatccctttgcccacaaacgagccttccccaaagagatcctgataaatatccgaagacatcatcgaataagggttattgcccggtacgctgctgcgcagggctgcgtaacgcccctgaccgttgcgtggtatctcctccgcaagaccgggctgtaaaataccgaatcctttgacaaccctctggcgtaccggatcatactcaggcgtattcagcggatgcgccatcgtcgcgacgagtttgtgtgccgtatcgcgcgggagcaccgtatcgctgtccagggtaatgacgtattttatgtgacccggtaaaaggtgggcaggcatctctgcaacgctgacgaattgcgttccgggatggcgcaaccagctgttcagtaacgccagttttccccgcttgcgttcatagcccatccacgctccttccgaggggttccattcaggctggcgatgtaacagataaaaacgtggtcggccggaggggtagcggcgattaagcgcctgcgtatcggcgatagcctgtctgagcagcgcgtgactttccggcgagggttcattttcagaatcagcaaaatcagtgagcagcgcgaacctgagattttcgttttcattccccaaccagcagacttcaagactggtgaggagctggctgaaactttcgtggctggtcaacatgcagggaatgactaacatggtggcactgtcagcgggaataccggctgaaaaatccatccccggtaagggtcgaggaacgcgaaaacgggtggttgcatcactgagcaaatcgctcattaactgagttaatgcgataatcagaggtaatatcaccgcgatcaatagccagtctgcgccctgcatggcggtttcgtgcaatattgctgcggtcgctgcggttgtcagcaacgccaggcttccaagccatgacagcagggttattctgttgaaactgtgccgcaagcgtatgagccttgaggcgtctgccaggagatgaatatccagcgcctgtcgaccttcgcccgcaagataataaccaacatgatgttcctgtgtatcgggcgctttttcctctgaaagcgccagcaccttctcagcaacctcaggctcgctgagaccgctgtccctggccagaacctcaactacgtgccggtaatgatcccgggtattgaagtgcatccggggatagatgccggcaggatcattgcgtaatgcctgttcgacaacgcttatcgtttcggcgaaatcagcccagtccgtttcactcaataaacgcaggcccgcgatgctgttactgacggacagctggctggcggcaagctgctgattgaaactatgtatgagaacgtcagtggtgatcccctgttcccgaaggcactgatcaacccaggtcagaggtaacgacagcgcgttgccatgcccctgcaggcgccgcaccagctctgcgacaaacgcactggttaacggaggtcgggagcgcgccatatcggcaaccaccatgattaaatcaccaggcgcactctctgcgcattcgacaatccttgttatccacgtatcagcaaggtttctgtcctgctgcgcttttatcacttccatactgatacgacgaagattttcaatcagcgcaaggcgcagcattcccggtaacgcccagacttcacccagcgtcagcggcgtcacctgttgataggcagtgagatagctggtcaggctggcggcatcccagcggccatcgccgtgagcaatggcctctgatgcaatatgataaattcgtgggcaattcaacggcgatacaagcgacggaagacctttgccaaagcttttcggcagatgctggcggacagtgcggatttgttcctcaatcagataataattgtccagcagccattcaccggcgggcatgatactggtctttttacccgcgttaagctcatagcagttttgggtaatgacggcctcattgtcgccaagccgtttcagaagataataaggatgcctatccggtgatactttatgagtccgcgccagcttctggccgtagcgttccatctggacggtcgaaaagagttctgaccgcggcgagctttcaccggcaggattgttcgccgaaaacgttatgttttcggcagcattcatcagaatacgggagcggttaaaccacgctctggggatcattttcatagcattgctctgatgcgacgttagcgcgcaggagcagttgcgaaatcagttcagaaacgttctctcaggatgggcgtcaggcatcagggatttaacagctgccggaatctaacataagtataggacatgagctctgttctgcggttttggtcgagctagcgtcgggagataaacagagccttacatccggggcaaagcatggtctggttgagccggatttttgacaacggttgtactgattttaagccacaaacaggacaggcagcagtggcagtagacgcactgctgaagaatttcattgcgtaattgataacagacataaccattaacctttcaatgaatgagcttcaccgtaccacatgtggttaagttttaatctatctattttgacacactgaaaatcaggaaagataaatgttcgcagccacaggccccctgagaccgtttatccggcaaaactctatgcggcttccagggatgagtaattctgattcgcgagagttaacggctgaaatgtgaagcagaacgtcttttcgtccatcagatgggatgatgaggcctttaccactaagaatatcaaagcttttgacaattcctgtcattttatgggacaagtcaattccttattgaaaacacgtaaagactatacattgaaaatggcattcagccacttttattttccctacaggacctctggacggctaaaagataatttgcttatatcgattccctgtgccttaatgaatcccatcagttcgatgtactaatgaaagttagaaattttccgggcagttctcattaccaggcgctatcgttgatatcccctcttttgagtccatatgtttaatcctatacgtttactatcaatacaatcatgtataacggagtcagtatgacctctagaattatgggcctggttaaatggtttaacgaagacaaaggttttggcttcatctctcctcttgatggcagcaaagatatctttgtccatttgtctgcacttgatggcgacaactttaaaactttatttgaaggtcagaaagttgaattcgccattcaccgcggagacaagggtcctgctgctgcaaacgtaacactttgcgataaataaatcattgtgggtctgcgataactataaaggattattcctgagtagacagatccataacttaaatcagatgaaagtcgtttattcataatatctgatcagcatatttttcaaaattatgagtatgctaaccgatgtgatgaagtgcagtactactgcataaaaagtctaaaagcacaaactaaccacatgttaaataagaagtgcgtaatggctttgaccttaatggcatctgccagttaatatccacgagagaacagggtaatagaatatgattaaagtccttgttttctttaatgctgaatcctgtaaagtcatgaccgttctggaaggtatatcctctatcaggcaggaatatccaaacggtgaagaaacacatcttcggattatgtctgcaggttttccttccttaactggcgatcatggtattgtttacgtggctactgacagggagttaacgtcacaggagatacttgatgcggccaggaaatatttatagcatttttgtcatgctctctgctccacgtttaattgcatgcttaccctatttatcagaatcgaacaaaaatgagttgaaaacatttatggcctgctaacagcaggctttttttttacattacacttttttagaaacacctctataaagagagagtaattcgctaccttctgacaaaatgcaggtgtctctcccctgcgtgccatcttgccatttgtgaaaaaccttgctaagtggcggcgctgtctctcctcattttaaatctcatcaggtgtgactgaagcaataagttatgaggatataaaaaggctctccggatgactcctggcatcatagttttaagtaccttcaaaaacgcatggacatttcgtaggagttgtaatttagttcttacacattcttcttaattttttcttgcgacaagagatttatataagtagtctaaacctcgttaataacaatatgtcccaatcgcattaaaatgctcagtaagaaaaatcgggtcgatgagcaaccgtcgacattggtatttgctgaacaacgaaaaaactttaaaaggtctctttatgtcagatgctctaacacagttaaacaatatccgtaccttacgttctcagactcgtgaaatgtcattagatgtactggaagatgttctggaaaagtttaaaattattcttatagaacgacgagaagaagagacattacgtcttgcaaatgaaagtcagcgccgcgataaactggaaacacttcgtcagatgatgcttgatgagggtatcgacccctccgaacttttagctgctattggctctccgggtaaggctaaaaggacgcgctccccccgccccgcgaagtatcgatatactaacgaaactggagagtcaaaaacatggtcaggtcaggggcgaatgccgaagcggatctcaaatctgattgctgaaggtggggaattaaaagattttgaaatcagctaaaaagagccgggtaaaacccggctcttttttgtaaatgccgcaagttgccttagagaatagtcgagaaacatttagttccgtcgatgtagccgaggcgctgtttaaaatcacagtgctgcttaagggagaaaccggttatcttgcagatcgctacagcgagtgaaaagagagccatcaggagctttcattccgagtcaatcaggacaaaaaataacgtatgttcttcgtgaatccatactgcatgagcttaacaacgtctgccattggcacaaagccgatcttcagccctccctaaagattaatgaacacatctaataaaccctagctaattaccccatctaatcgaataaatcagtttgcgttatgcttttccaacacaacagctgaaggataacgtcatgcaaactgtaaaactgaacaacggtattgaaatgcccctgctgggctttggtgtcttccagatgacggatgctgctgaatgcgaaagagcggttattgatgcgatcgatacgggataccgcctgatcgataccgccgcgtcttaccagaatgaaacccaggtcgggaacgctctgaaacagagcggtatcgcgcgtaacgaactttttgtaacgaccaaactgtggctacaggataccaattacgaaggcgctaaagcccagttcgaacgctccctgaatcggctgcaacttgattacgtcgacctgtatctgattcaccagccttacggcgatgtccatggggcatggcgtgctatggaagaactgcagcaggcaggcaaaattcgcgccattggcgtcagcaacttccatccagaccgactggccgaccttatcgcctttaacaaagtggcccctgcggtaaaccagattgaagtaaaccccttcaaccagcagctgcatgctgttccgtggaatcaaagccatggcattcagccggaagcctgggcaccgtttgctgagggtaaaaatggcctgttccagcatcccgtgttaacggcgattggccagaagtacggcaaaagcgtgggtcaggttgtgctgcgttggatcttccagcgaggcatcgtttcgctggcgaaatcggtgcgcaaagaacgcatggaagagaacatcaacattctcgattttgaactcagctctgaagatatgctgcagattgctgccctcgacactgcaaccagcgccttcttctctcaccgcgacccggcgatggtggaatggctgacgggccgcaaacttgatgtttaagtcccgataaaagaggtattcattcaatgcaaaaacgttatctgggtaaatcccgactcgaagtatccgcgcttgggctcggttgcatgggcttaagccacggctatggtccggcgaccgatactcgtcaggctatcgagctcattcgcgcagcggttgaacgtggcgtcaccttcttcgataccgctgaagtgtatggaccttttcttaatgaagaggttgtcggcgaagccttaaaaccatttcgtgaccacgtggtcatcgccactaagtttggttttacttttggcgacgacaacaagcagcagattttaaacagccgtccggagcatatccgtgaagctgtggaaggatcattacgccgtcttaagactgatgtcattgacctgctgtaccaacaccgtgtcgatccagatgtcccgattgaagatgttgcaggaacggtgaaagacctgatagctgaaggcaaagtcaaacatttcggtctgtccgaggctggcgcgctaaccattcgtcgtgcgcatgccgtacaaccggtcactgccctgcaaagcgaatactcaatgtggtggcgcgaaccggagcgggagatcctgccgttactggaggaactgggcattggtttcgttcccttcagcccattaggcaaaggcttcctgacgggatctattaagccaggaacaacttttggcatggatgattaccgcagcactgtgccgcgtttcgccgagcaggcgattgaagccaatgaaaagctggtcgcattgctgggtgaactggcggcagagaaaggtgtgacgtctgcacaaatcgctctggcatggctgctggcacaaaagccgtggattgttcctatccctggtacaaccaaaatgcaccggctggaggaaaatctgggggctgccgacatcattctttcacaggatgactcactgcagataacccaggcgcttgaaacgattaaaatcgtcggcgagcgttactctcctgagcatcaggctcgcgtgggccgttaatacccggacgggtctacggacccgttattccgagtagcgaagtgcatcgatcatcaacgcaaaagcgggcggatgctgcttacggctcgggtaataaagataatatccggggaaagacggacaccagtcctgcagaacctgaataagctctcctgactttatataatcctgcaccctgtcttcaggtatacaagcgatgccaaaaccggataacgccgcatcaatcctttccgcttgcagattaaacgtgacctgcccttccactctgacccgtaacggtttcccatccttctcaaactcccagtggtaaagcccaccggctgttggcaggcgcatattgatacaccgatgattttgtagctcgtgcggcgtttcaggtgcagggtttgcagcgaaataagacggtgctcccaccacagccattctcatgtccggcccaattcttaccgcaatcatgtctttatccacgctttcccccagacggatcccggcatcaaaacgcccctcaacaatatcgacaaagccgttatcaacgaccagttcaacattgatttccgggtattccctgaggaagggttttagcttcggccataccagacttcgcacggcatgctccccggcagataaacggatattaccggaggcagtgccgttcagttgaaccagcgattccagttcctgctcgagatcggcaatacgcggttcaaggcaggcaataattctctcaccggcctctgtaggggctacgcttcgggtcgtgcgggtcagaaggcggatattcagcctttcctccagggccttcatcgcgtggctgagtgcagactgagaaacgcccagtttgcccgctgctttggtaaaacttcgctcccttgccaccacaagaaagatttgcagttcgttgaaattttctttgagcatcggcgatttccttatggaggcattcccttcatcgcacactcatgaagggtgttcatagacacaatcattttagccctattactgacattaatgataattgatattctgaccgtatcgaaaataagtctgaattatcagtaggtttatcatgagaatactcgttgcaggggcgacaggaagtattggccttcatgtcgtcaataccgctatcaaaatgggccatcagcctgtagcgctgatccgaaataagcgcaaagtgaaatcgcttcctcggggaacagatattttttacggcgatgtttcattgcctgaaacactcaccgaattaccgaaagatattgatgccatcatcttcactctcggttccgatggtcagggtcgtattggtgccagggcgatagattatggcggagtgcgcaatattttacgaatattcagggatgtatctgttcgtatcagcctgatgaccacgattggcgtgactgaacgactcagcacctggaatcaacgcactgaggttcatgactggaaaagacgtgccgagcgtctggtcagggccactgatcacccctataccatcgtcaggcccggctggtttgattacaacaatgatgatgaacaccgaatcgttatgcttcagggagatcgtcgccatgcaggaacaccggaagatggtgtgatatcccgggagcaaatcgcccaggttctggtcagtgccctgacccacgacgaggcaaaaaataaaacgttcgagctggtggctgaacgaggtgaagcacagcaggatcttaacccactgtttgcagacctgcaggctgatgatccacaaaaaaatgatggggttctggacatagacaatatgcctctgcgtgaagaacctgactgcattattaacgagctgaatttgtattcaaaaaaattaactaatcgacaaccctgacaattttgtcatatagccgtcagcctcatgacagtttaagtctgtatatttgaatacacagatggaggaagttactcctgatacaagtccagtttcaagcatattgttaaagaggtactagatatgaaaacactacttattactacattggtcatggggtttatttcagtgaatgccgcctctgctgctcaggaaattaaccatgcagatgggaaagaaaagatcggtgtagtatcagtaagcaatgcatatacgcttgatgatttatctaatgcgctctctcgtaaggctgatgagcaaggagcaacgtcattcaaaatcctgtcgacaacgggggataacaggctacatggggttgctgaaatatataagtaaatcattagcatcccgacaggatgtgtcacagccctcttatagtgagcgtcgttctatgttcagaacagaagacatcatcgatgagataacttaatggattgattcaaacttacataaaccgctgaagatagaggatgttgctgcgtgggcaggatactccaggtggcatcttcagcggatttttgtgcaggtgaaataatttatttactccttctttccatgataattatagaaatgtgcagatacaccacttctggactttatagatagctcttcatgcctgtctctataataaaaataaagctcatcgacaatatttttacaagaagagagagcgctttgtatttcattaactacaagatcgtatattttatctcttgatttttcatatattacatttaaatcatatccttctaggtgtgaaccatagccctctatccacgacatattcttaaacatctcatcatcatcagtgtataaattacagaatcccttatgagctcttgtatttctatctgtacgtagaggaccaccagaggaatcaattatttttaagttactcaaaatatcagcatgagtgtctttaataatcttaccgaattgtttaatatttaaagagtaatctgggatattaagttctaaaacctcattaacaaaatgaaaggttatatcgcgaaggcttgaaaatctaaataatgccaaatcaacaattgccttaagccaatcatatcgatttatattttttacttttgaaaccaatggcaaattattaacccctagcatttgagggatgactcttaaatctacgaattgttgttctaatgcgttaaatctaatataggtcaaatgcgcatatgccatatggggatctgctttagagaactcattccaatcagcgtaggaatgatcatacagaaaatatgtattaatcgaatcataaagtacccctttgaaagcagtcccctccagatcccaccaataataatcatctttcatgaaaagcctcgctgaagttaaatgcaaaatccaaaaaaaatcttattttaatgtcagcctaaaaccttatccaactctttactatcagaataaacacttagtattttacgcacccattcctgattatataaatacccatcaaaaccttcgatataaccacagtatttcccttttagagttttatctacatgagatggtctgacatcaaaatgcttccaaaactttgcatgagtactaagattaaaagacttatgttttttttgaaccaactcaactacctttttaggtttcaacttaaattgattttccactcctttgatgaaagcaataccagtatcaaacttctcaagttcatcttcggtgagattattaacattgataaactctatagaaatatcagaacttgatgcctttttacctatcaaggggactaacaaagctctgagtcgatattgttgactttctaatatctcttgctccaagtctcttttataatcctcgatatatttcttaacaatagtgaaattttttgattggactttcttcaaagcgtcgatctgcgcttgctgagacatccttgtaagttgcattgcaagagataagtttaccattaaagcattttcatcaccaaattcgttaatgagaatatcttcaaagttatttattgaagcctggcactcaccaaaagttagtgtatctatttcagggagacctcggtgttcaatgatattacgtaaacctattaaaaaaaacacattcgatttttctggggtatttcttccaagccaatatttttcacagcaggttttcagttcccacgcttttttgtcaccatcaacaattttatgagagccatcatcattcaagtaaaaataatcaacacctctttttgcgaatatagcatgaaataatgatgtatatgctataaccacattaactataaaaccatgagttttaaactctgtaaatggattattgtaaacagaaacagcaagcatagcgaactctcttgctttttttaaattaatgcttcgctcacttttggccggttcaacgctcttctgactatgaagatttctgaagtcttccttacttaagtattttaatccaagtgtggtatattgagcgccatcccttgatatatatttactccatcttttagttggatatgttttacatgtctgaactttccaaccagtagccactgctaactcagcaatagtaaaaaattcttgccgattttcctttcctactaaaaaatcaaaagccttatcaacctgatcatattttttcatacaacatccctatttaactcttaaagatgaatgtctttttagattggtctgcgaaaattttttcgcaaacaaataaaaagacattgtacattctaaatatattattttaatgtacctacatcacacataaaagataacaactcgccataccactgcatcatctccctcctcccatccagatactgcgcatggttatacgtcccacgaattgagttcttatcgacgtgagccagctgtaactcaatccaggccgaattgaaaccctgctcatgcaaaatggtactcatcgtgtggcggaatccatgccctgtaacgcgcccggcatagccgatacgcctgaccaacacagtcaatgccatatcactcatcggtttcttaggatcattacgtcctgggaacagcaacgctcctgctcccgtcatgggtttaagctgattaagtaggtcaattgcctggcttgataacggaaccagatgagggcggcgcattttcatgcgttccgctggtacattccaaacctttttctcaaaatcaaattcctgccactccgcttgcctcaactccccaggccttactccggttaaaataagcaattgcatcgcaatcttaacaagcacactaccagcataggtgttcagagtccgaagaaactcaggcaattcatcctgggttaaaaaagcatagtgttctttttcatgaggagttactgcactggctaaatcaggtgctggattgtactcggccctgccagtcacaacagcatacttccagacctctccacagcgctggcgaaccttacggaccttctcagttgcccctcgagcttctatctttgaaagaactgcaagcaactccatcggcttgatatctttgattggccggtgaccgatataaggaaatacatctttctcaaaggttcgcatcatctcttcacgataggagacagaccagcggtcatagcgacgctgataccactcccgcgtgatagcctcaaaagagttttctgcgtcttgttgacgactaagtttctcaatttttcgttcaagagaaggatcgttacctgcggataatgtccttttagcatcctcacgcttacttcgggcttcagctaaagaaacatcagggtaaacgccgatagcgagcagtttctctttacctagtgaacggtatttgagacgccagtatcttttgccgttgggattaaccagcaggtaaagaccaccaccatcagccagtttgtagggcttctctttgggttttgcagtttcaacctgacgagctgtcagcttcattgggggtacctctcagcagggggtacaattatacccccatccatacccccacattgagcttgaccctgggggagtacaattgagttcaatagactaatagaatgctataactgctgatttatcaaggaaaagttgagtttggtagacttcagggaagttgagtttggagcgggcgaagggaatcgaaccctcgtatagagcttgggaagctctcgttctaccattgaactacgcccgcgaagaggtgcgagggccattatagaccttacgcacccgctgacaagcccataacaggctaactgtcgataaaataaccttttagcacttaggcttactgccctgcggcggcaaatagcgcagcgggtcgatcgccgtcgcccggtagcgaatctggaagtgcaggcgcacggaatccgcgtccgagctgcccatggtggcaatctgctggccaatcttcacgctctggccgttattcaccattagcttgtcgttgtgcgcgtaggcgctgatatagtcctcattatgcttaatcataatcaggttgccgtagccgcgcagctggttgcccacgtagaccactttgcccgcccctgccgcatacaccggctggccgcgcttaccggcgatatcgatacctttattgccgccatcgctggtggagtatggcagcactactttaccgctggttggccagcgccagcagcgttgcccgaccggcggccaggaggattgcggcaccgccgaagatggcgtcaccgcggcggtacgtttcgtcgacgatttcttgccggatgcccccgccttcgccgtggtcccggaaccgctgtttagcttcagcttttgcccgacttcgatggtataaggaggtgaaatattattgagacgggcgagatccctgacgctggtgccagtggaacgtgagatagcgtacagcgtatcgccgcgcttcacggtgtaggtggaaccggaatcggatgagctggaacaccccgcgacgatcaggctgctcagcaacattattgcaataacaaagcgttttctcatcaggcgtcctgcgcttaacactaacattcacctcaaaaccagggcgattatcataccagtccccagggcattccccaatcgctacccgtcatacagaagtattaaacggatagccatgcgtaataatatccatcagcgcgggcagataaggcatagacggcaatttgaccagcgccgggtagaatatttgcggcgaggggaaaacatcaaccacgtagcactggttaagcttatcagcatccacttcagaagaaggtagcagcgtcgccgcctgcagtccggactccagccagtcgaggattacgcccggctgcgtaatgtgcataatcaccttggcgttgaccccggatttacgaaacagctccattagcatctcgtaagttcctgaatcctttgccctatgaagtaataccagcggcagcgccgccagcgacgtgtagctatacggattagacggcggccccggcaggcatcttttattgatcaccgcgaccagcttaatcgggtcaaaagagacataatcaaagccttcgctacggtaggggcgctggattaaggcgaaatcaattgcgccctcggttaataacgtttcgagatggctggagtcagtaacggaaatatttatggaagtgtcgggatgacgtcgatatacctccatcagcaacgctttaaaataattctgatagagatgagttaagccgattctcaattcagttctgtttttgtgcgcaatatccatcgtttcccgcgccgtatcctctacctggcgtaatatttcacacgcttttcgatagagaaaaaaaccggcttccgtaggctcaatgcggtttccccggcgaacaaaaagcgatacctgaagctcctcttccagctcctgaattcgcttgctgagcggcggctgcgccatgttcagcgacttcgccgcctggctcaccgaaccttgttccaccacccgacaaaaatagcgtaagcgctttaaatccatcatcattatccgcagtgtaatttatcaccagtatcacacttagccggagaaataaaaagccgcagcgttgctcctcatattaattaatcattatttaacaccttgttaaaataaacttttttgatctactgaccatccggtaaacggtatttgtttatgcgcgccagggaaaatattgtgccgggagcaaaacttcttttccgaaggaacatcccatggcaaatagtgataacaaaaccccctcatcggtacatgatttacgctccgcgctggaactgctgaaaacgcttcccggcgagtatgttgaaaccgataccgaagtcgacccgcatgctgaactctccggcgtctatcgttacgtaggcgccggcgggacctgccagcgtccgacccgcaaaaatggcccggtcatggtctttaacaaaatcaaaggctttaaagatatcagcgtggcgattggcctgaatggctcccgccagcgcgtcagccatttcctccagtgtgaaccggctaaactggggcatctgctgaaggattcggtggagaatgcgatagcgccggtgatggcccagggcgcagcggtctgccagcaagtggtccacctggcaagcgatgccgatttcgatctgcgcaagctgctgccggcgccgacgaataccgaagaggacgcgggcccctatatcactatgggtctgtgctacgcctccgatccagaaacgcatgagtccgatatcaccattcatcgcctgtgcgtccagagccgcgacgaactctccatgtggctaacgcccggccgccatatcgatgcttttcgcatgaaggcggaagcggcaggccagccgctgccgatttcaatcagcatcggcgtcgatccggccattgaaattgccgcctgttttgagccgccgaccaccccgctaggcttcaatgagttaagcatcgccggcgcgctgcgcggcaaagcggtggagatgacgcagtgtaaaactattaacgagaaagcgatcgcccacgctgagatcgtgattgaaggcgaactgcggcccaacgcgcgcgtacgagaagatcagaacacccataccggccgcgcgatgcctgagtttccgggctacaccggcgaagctaaagaggcgatcccggtcatcaaagtgaaagccgtcactcaccgtatcaatcctatctggcgcaccaccgtagggccaggcgaagaacacgtcaatatggccggtatcccgaccgaagccagcattctggatatggtcgagcgcgcgatgcccggcaagttgctgaacgtcttcgcccattccgcgggaggcggcaaactgctggcggtgctgcagtttaaaaaatcctccccggcggacgaagggcgccagcgtcaggctgctctgctggcgttctcagccttcccggaactgaagcacgtcattctggttgatgaagacgtcgatattttcgacagcgacgacgtgctttgggccatgcaaacccgctaccagggcgatgtcgatacgatcgttattcccggcgttcgctgccatccgctcgatccgtcgcaggtaccggaatacagcccgagcatcctgcagcagggaatgtcctgcaaaacgatattcgactgcacggtgccgttccatctgaagcacaccttccagcgctccagatttaaagaagtggacgtgaagcgcttcctgccggatttcgaataaaaggagaacctcatgacggcacgcatcatcattggtatcagcggcgcatccgggtttcagtacggcgttaaggcgctggagctactgcgcccgcatcccgttgaagtccacctggtcgtctctaaaggcgcggaaaaaacctgcgagctggagacggatcaccgcctggacgaggtgatggcgctggccgacgtggtgcatcccatcgcgaatcttggggcggctatctccagcggttcgtttaaaacgctgggaatgttgatcgcgccgtgttcaatgcgttctttaggcgccatcgcccactgcctgaccgacaacctgctcacccgcgctgcggacgtggtgctgaaagagcgtcgccgcctggtgctgctggcccgggaaacaccgctgaaccttggccatatccgcaatatggccgccgtaaccgaaatgggcggaattatctttccgccggtcccggcactttaccagcgtccgcaaacggcggacgacatcgttacccatagcgtcaatcgcgcgctcgatctgtttgacctgcaggtcaacaacatcccccgctggggtgaaggcgagctacgttttaattaaccggaaattattcaatgttaatcggcccatatgtaaacggagccgccgtgattatcggcggactcatcggcgctgcggcgggcggcaagctccccgagcgcgtcaaaacggcgctgccgatgaccttcggcctgtgctccgttggtcttggtattacgctggtgctcaaagtgaaatatatgcccgccgtcgtgctggcaatggtgattggcgccatcctcggcgaattgctgcatctggaaaagggcatcggtaaagccgcaggttccacccgcggtttgatcaacaaggtgctgccgccggtcaatggcctcggccatgaagagtttaccgagaaatttgtcgccatcctggttctgttttgcgccagcggcaccggtattttcggcgcgatgaccgaaggcatgagcggcgatccgtcaattctgtatatcaaaacgattctcgatctatttaccgccgggattttcgcgacgctgctgggctacgcggtgatgaccattgctatcccgcaggtcattattcaggtggcgctggcgatgctggcggtggttattctgccgtcgatctcgcctgatatgatggcggatttctcctgcgccggcgggctgctgatggtggcgaccgggttgcgtatctgtaacattaagctctttccggtagccaacatgttgccagggcttgttttggtaatgcctttgtcccatttatgggctaccctagtggcctgagtacatgacccggcgggtttgtgccgggtcattttctatttcaggagttgtcatggccggggaacatgtcattttgctggacgagcaagataagcctacaggtatgctggagaagtatgtcgcccacaccctcaacacccctctgcatctcgcgttttccagctggctgttcaatgaacaaggccagctgctggtcacgcgccgctcgctgggcaaaaaagcctggccaggcgtatggacgaactcagtctgcgggcatccgcaaaccggcgaaacctttgaacaggccgttgagcgccgctgccgctttgagctcggcgtcgagataacccgcatcgtcccggtctttccggggttccgttaccgggccgtcgcgccgaatggcattgtcgaaaacgaggtctgcccggtctatgcggcacgagtcgccagcgcgttacggataaatgctgacgaagtgatggattttcagtggagcaatcttgcggatgtgttaagcgggattcgcgcgacgccctgggcttttagtccgtggatggtgctgcaggcggcggacgataatgcgcgtaacgcattaatcagctttagcaatcaggcataaaaaaacccagctctgctgggtttttttattcgcgtaatgcttattttaccggacgcatcgccgggaacaggatcacgtcgcggatggtgtggctgttggtaaacagcatcaccatacggtcgataccgatacccaggcccgcggtcggcggcaggccgtgctccagcgcggtaacgtagtcttcgtcatagaacatcgcttcgtcgtcaccggcggctttcgcgttaacctgatcgaggaaacgctgcgcctggtcttccgcatcgttcagctcgctaaagccgttaccgatttcacgcccgccgatgaagaattcaaagcggtcggtgatttccgggttctcgtcgttacgacgcgccagcggagagacttctgccggatattcggtaatgaaggtcggctgaatcaggtgcgcttccgccacttcttcgaagatctcggtcacgatgcggcccagaccccagctcttctcaacgtggataccgatgctttccgcaatggcttttgcagaatcgaagttatccagatcggccatctcggtttccggacgatacttcttgatcgcttcgcgcatggtcagcttttcaaacggcttgccgaaatcaaaagtctgatcgccgtaaggcacttcagtatggcccagaacgtcctgcgccagagtgcggaacagggattcggtcagttcgatcagatctttgtaatccgcatacgccatatagagttccatcatggtgaactctgggttgtggcgaacggagataccttcgttacggaagttacggttgatttcgaacacgcgctcaaagccgccaaccaccagacgcttcaggtacagttccggcgcgatacgcaggtacatgtccagatccagcgcgttgtgatgggtgatgaacggacgcgcggacgcgccaccggggatcacctgcatcatcggggtttccacttccataaagccgcggccgaccatgaactggcggatgccggccaggatctgcgaacgcactttaaaggtgttgcgcgattcatcgttggagatcagatccaggtagcgctgacgatagcgcgcttcctgatcctgcaggccgtggaatttgtccggcagcgggcgcagggctttggtcagcaggcgcagctcggtacaatggatggagagttcaccggtcttggttttgaacagcttaccgcgcgccgcgatgatgtccccgaggtcccattttttgaactgctcgttgtagacgccttccgccagatcgtcgcgggcgacgtacagctgaatgcggccgccaacgtcctgcagcgtaacgaaggaggctttacccatgatacggcgggtcatcatgcggccagcaacggcgacttcaacgttcagcgcttccagctcttcgttttctttgccatcgaagtcagcgtgcagaaggtctgaggtatggtcacgacggaaatcattcgggaacgggataccctgctcacgcagcgcggccagcttctcacgacgggctttcagttcattattaaggtcaattgccgcgtcagcgccctgtgcttgttgttcagacatgttggttcctcataaccctgctttcaaacttgcttcgataaattgatccaggctgccgtccagcaccgcctgagtgttgcgggtttccaccccggtacgcagatctttaatgcgggagtcatccagcacgtaagaacggatctggctgccccagccgatgtcggatttggtatcttccatcgcctgcttctcggcatttttcttctgcatttccagctcataaagcttcgctttcatctgcttcatggcctggtctttgttcttgtgctgtgaacggtcgttctggcactgggtcactaagccggtcggaatgtgggtaatacgcaccgcggattccgtacggttaacgtgctgaccgcccgcgccggatgcgcgataaacgtcaatgcgcagatccgccgggttgatgtcgatatcaatatcgtcatccacttccggataaacgaacgcggagctgaaagaggtgtggcggcggccgccggaatcgaacgggctcttacgcaccaggcgatgaacgccggtttcggtacgcagccagccgtaggcgtagtcgccgataatcttgatggtcacagacttaatgcccgccacttcgccttcagactcttcgatgatctcggtcttgaagccgcgcgcttcggcccagcgcagatacatgcgcatcagcatgctggcccagtcctgcgcttccgttccgccggaaccggcctggatatcgaggtagcaatcggcgctgtcgtattcaccggagaacatgcggcggaattccagctgcgccagcttctcttccagcacatcgagctcggcgacggcttcgttgaaggtctcttcgtcttcggcttcaatggccagctccagcaggccggaaacgtcctccagcccctgagacatctgatccagcgtatcaacgatggcttccagcgaggaacgctctttacccagcgcctgcgcgcgctctggttcgttccagacgtcaggctgctccagctcggcgtttacttcttcgagacgctctttcttagcatcgtagtcaaagataccccctaagaacgtccgagcgctccgtgaggtcctgaatacggttttttaccggatttatttcaaacatggtcggtttcttttaatggattcgtcaaaatgcggtgataagagcggaattctaccggattcgcgccctcattaatatactgttctcaatttggccagaggtggtcaatgatcagctgcaggctgcggttgccgcggaactcattgatatcaagcttataggcaagctgaacttcgcgaacgccgttatccggccaaagggaagtatcaacattgaacgcgataccgtccagcagcgggccgccgccgaccggctcaaccatcaccttcagatgacgctcgccgaccaggcgctgctgtagcagacggaaacggccgtcaaacagcggctccgggaacatctgcccccacggtccggcgtcgcgcagcatctgcgcgacctccatgctcatctctgccgccgccagcggaccgtcggagaccacttccccctgcagcagcgcaggatcgagccactcggtcaccagctcgccgaagcgctgctggaactcttcaaagcgcgcctcttccagcgatagccccgccgccatggcatggccgccaaacttcagaatcagcccgggatagagcgtatccagacgctccagcgcatcgcgcatatgcagcccctgaatcgaccgaccggagcctttgagcgtaccgtcgccggtgggcgcaaaggcgataaccggacgatggaaacgctctttgatacgcgaggccagaatgccaacgacgccctggtgccactgcggatggtacatcgccaggccgccgggcagcgtctcaccgctgcgctccagcttctcacacagggtcagggcttccgcctgcatcccctgctctatctctttgcgcgtctggttcaacgcgtccagctcattggccagcacccgcgcttcgccggtgttgtcgcacagcagcagcgccacgccgacggacatatcgtccagccgcccagccgcgttaagccgcggaccgagcgcgaagccgagatcgcttgccgccagcttttgcgggtcgcggttggcgatctccagcagcgccttaatgcccggacggcatttccccgcccggatgcggctcagcccctgccaggtcagaatacggttgttggcatccagcggtacgacgtccgccacggtgccgagcgccaccagatcgaggaggtcagccagattcggcggcgcaatgccgcgctcctcaaaccagcctttatcgcgcagaaaagtgcgcagcgccagcatcagataaaaagccacgcccaccccggccagcgatttcgacggaaactcacagtcgcgcaggttcgggttaataatcgcttccgccgcgggcagcgaatcccccggcaggtggtgatcggtcaccagcaccggaatacccagcgcatgggcgcgatcgacgccagcgtgcgaagaaataccgttatccacggtcataatcatctgcgcgccgcgggcgtgagcctgatcgaccacttccgggctcaggccgtagccatcttcaaaacggtttggcaccaggtacgagacgttgccgtagcccagcgcccgcagggccagaacgctcagcgcggtgctggtggcgccgtcggcgtcaaaatcgccgaccaccacaatatgcagcccctgctgaaatgcgccgtagagcatctctaccgctttttcgacgccggtcagctgcgaccacggcagcatgcctttcacgccgcgttccagctcctgcgcgctacgcacgccgcggctggcgtacagccgctgcagcagcggtgggagatcggcaggtaaatcgacgccgtcagccgcctcgcggcggcgtagttgtatctgttgtttcacgcgaatcagttaccgcttgtctgtttttgatgctcatcaaggagcgctttcaggtctttaggatcgcgatagccgggcatcagcgtgccgtcgctcagcaccatcgccggcgtgccgttaacgccaagctgcacgcccagcatgtagtgtttagcgatatcaacatcgcagctggccggctgcacgcccttaccgctcatcgcgtcatccagcgctttgttacgatctttagcgcaccagatagccttcatattctgctcggcttcgctttgcagcccctggcgcgggaaggccagatagcgcacggtaatacccagcgcgttatagtcgctcatctgctcatgcaatttatggcaataaccacaggtaatatcggtgaagacggtgatgacgtgtttttcctgcggcgctttatagacgatcatctctttttccagcgcgttcagcttaccggccagcagcgtattggtgacgtttaccggctgcgcgccgctgacgtcgtacatcggcccctggataatgtgcttaccgtcatcggtaacgtatatcacgccgctgtccgtcaatacggtgctgatgcctttgatcggcgaaggttgcacgtccgaactctgcacgcccagcttcgccagcagttgcttgatcgccgcgctatcggcatgcgccgcaccggataaggtggtcgccagcagagtgaacatcagtaaaccttttttcatactcagtcctttttttcagcactcacgcacgcgggtgatgctgttgatggagttgtcgcagacgctcggtcgccacgtgggtgtagatctgcgtcgtggagagatcgctgtgtcctaacagcatctgcaccacgcgtaagtcggcgccatggttaagtaaatgcgtcgcgaacgcatggcgtaacacgtgcggggagagcttttcgctgtcaatccctgccagtacggcatagtgcttaattcgatgccagaacgtctggcgcgtcatctgctgcgcgcgctggctgggaaaaagcacatcggacgccacgccgttcagcagccaggggcgcccgtattcaaggtaattctcaacccacagcaccgcctcttcacccagcggtaccagacgttctttatttcctttaccaatcacgcgcagcacgccctgtcgcaggctaatgtcgctcatggtcaggcccaccagctcggaaacgcgcagaccggtggcgtacagcacttccagcatcgctttatcgcgcagctccagcggttgttcaaccagcggcgcctggagcaggcgttccacctgcgcctcgctcagatccttcggcagcctctgcggcagctttggcgaggccaacagcgcgctgggatcgtccgggcgaattttctcccggtaaagatgctggaagaaacggcgcacggcgcttagcaggcgcgcggtgctggtggctttatagccgccggtttgccgctccgccagcagcgactggagatcttcgccgctgacgctggcaagcgacaggccacgatgatgcagccattcgaccaccatcgtcaggtcccggcggtaggcgcttagcgtgttctccgccagattccgctccagccataaggcatcaagaaactgctcgatttgtgcgagatcctgttccactccggcctctttgcttattaaaacggcgccattataccctaaataattcgagttgcaggcgggcgcggcctttctggtacactaagcgcaaagtcacagcaagaattgagacgtttccgcgatgaacataggtcttttttacggttccagcacctgctacaccgaaatggcggcggaaaaaatccgcgatattatcggccctgaactggtcacgctgcacaacctgaaagatgattcccctgccctgatgacgcaatacgatgtgctgatcctcggcattccaacctgggatttcggcgagatccaggaggactgggaggcggtctggcagcagctcgatacgctggatctgcagggtaaaatcgtcgcgctgtacggcatgggcgaccagctaggctacggcgaatggttccttgatgcgctcggcatgctgcacgataagctggcgaccaaaggggttaagtttatcggctactggcctactgaaggctatgaattcaccagcccgaaaccggtcattgccgatgggcagctgttcgttggcctggcgcttgatgaaacgaaccagtacgacctgagcgatgagcgcattcagaactggtgcgagcaaatcctcggtgaaatggctgagcagttctcctgagtccttgcctactcttgcgtcggttttagcaacaccagccgacgcaggtctcgccattctcccgcgtccatgctatccgccgcgacccacaaatgctgggttcgttggttttccgtattccgcaggcgcagcagcattccgctgttaatcacccacggggtgccgatgatatcccactccgccttttgccagcgcagacgggagtcgatcagcagcttgatttctccctgacgggcatggatccgccgctggctgcgcacgcagtcgaacaccaccagcgacagcagtatcagccacagcggggtatagctcagcggccagggcatcagcagcacaagcgccgccaccacgccgtgcatcagcagcgaaaaccactgcgctcgccacgagatgcgtaaatcagattgccacaggaccacgttcccgattccgtgtctgaattaattttaccatccgctgcagttctgcatcagccggctcgccatgattcatcaaccagttgaacagatccggatcgtcgttttccagcaggcggatgaataacgctttatcgccatcgctgagcgtgtcgtactcatgctcgaaaaacggcatgatggagatatcgagttcacgcatacctcgacggcatgcccagtggatgcgggctttattgttaatgtccatgttttacttcctgcttataaatatctcttagtttaacccgttttcggcgctgacttcactggaatatcaagtttcgcgagcgctattccatgaaaaccctaaaataatcaggccatttattatttcgctggtttcagcgccccgtctttgagggcacgaatggcctgtcaaaagcgcttgcattgcaccatagctcttttaccattagtcacacactctgcgttaagctattcaggatatgactatggcttttacaccttttcctccgcgtcagccttcctcttccgctcgtctgccgttaacgctgatgacgctggacgactgggcgctggcgacgattaccggtccggatggcgaaaaatatctgcaggggcagattaccgccgacgtcagccacctgaccgacgagcagcatctgcttgccgcgcattgtgacgccaagggcaagatgtggagcaatctgcgcgttttccgccgcaacgagggttttgcgtggattgagcgccgcagcctgcgcgatgcgcagctgaccgaactgaaaaaatacgcggtgttctctaaagtgaccatcgccgccgatgatgaatccgtactgctgggcgttgccgggtttcaggcgcgcgctgcgctgtcgccgctgtttagtgagctgccgaacgccgagaaacaggttgtcagcgaaggtgccaccagcgtgctgtggtttgcgcatccggccgagcgtttcctgctggtgaccgatgtggcaaccgccacccgcatcaccgatgcgctacgcggtgaagcgcagctcaacaacagccagcagtggctggcgctgaatattgaagccgggctgccggttatcgacagcgccaacagcgcgcagtttattccgcaggccaccaacctacaggcgctgggcggcatcagctttaagaaaggctgctataccggccaggagatggttgcccgcgctaaattccgcggcgccaacaagcgcgccctgtggtatctggcgggaacagccagccgcgtgcctgaggccggggaagacctggagctgaagatgggtgaaaactggcgccgaaccggcaccgttttagcggccgtgcagctggacgacggtcgcctgctggtacaggtggtgatgaataacgatatggagccggacagcgtgtttcgcgtacgcgatgatgccggtagcctgagcatcgagccgctgccgtattcgctggaagagagttaaagcgatattccctgccgccttctccccggaggcggcaatcccgcgcctgtctgggctaccccacccgcaaaccacgaaacacccgcggccgcgcgctttgcgcaaatgcgccatctctggcccaggccactttcttgcgtagaagaatagtgtatgttctgaacaatcatttatttcttaagcggtaaaagagatgagacggattgaggtcatactgggagagctggagcggttaactcgcgggctgaatcttgcggatctggaacaggaaacggcatttacggcggaagccatcggctttaacctcgggcttgcgcgcaactcggtcagcaaagacctcaatcagttatggaacgacggcctggcgattaagagcagaggacgccccgtgttcttttggcaccgccaggcaatggaaacgctgctggggcgcagactgaatgataccgaatgtgaagtgcgcacggttgccgaccttctgccgcatcaggaaggttgctcaacggatgaccccttcagcggcctgattggctacgatcgcagcctccgtgatgcggtggaaaaaggccgcgcagcggtgctttatcctcacgggctccacgtattgctgaccggcccctccggagtaggtaaaactttctttgccgagctgatgcaccgttttgcctgcgagcatgcggcgggttctcccccgccgctggtctactttaactgcgccgagtatgcgcataacccggagctactctcttcgcatttgttcggccatcggcagggcgcatttaccggcgccagtgagaataaagccggtctggtggagcaggcggacggcggatatctgctgcttgatgaggtgcaccgcctgccgtatgaaggacaggaaaaactcttctccattctcgacaaaggccaatatcgcccgctcggttcaagcgccacggcgcggtccatcacggtgcgcttgatttgcgccaccaccgaaccggtcagctcagccctgctgcgaacgttccagaggcgcatccaggtctgtatcgatctccccgggatccgtcagcgctcggtggaagaacaggtggaacttattgtcggttttctccagcgcgagagccgcaaaattgagcgtacggtcagtatcgacaaaacgctgttgctctggctgctgaataaaccgctggaaggcaatatcggccagctcaaaagcgatatccagtttctttgcgcccaggcgtgggccgcgggaatgaccgagcataacgacacgctccagctggataaacggctggtagaagtgccgttcaacgccaccccggaacagcgtctgctggtcgataccttgtttgacggccaggatcggctaagcgtcgatgcgcgcacgttacccgcattgaaaacctctctggcgacaggagcggagatcgaagaaagcgatctgttttacagcttcctgacccgcgaatacgtcaacctgcgcaacagcaacgtcccaccggctgagacgctggcgatcctcaaaaacaaactcagttctatctttgaatatggtctctacagccgcgacagcgtggcccatccgccgcgctatggcgatcggattgaagagcgggtgaccctgctaattggctgtgtggaacaggtgctgggctttacgctgccagaaaacctgatgaatccgctgcgtaaacactttctggcgctgattggctacgtgcagcgcgggctgatcccacagctctactcctccagcctgatcctcgaccgctgcaaagacgagtatgaaaacgcgactctgctgtgccggaaaatcaacgaactgctgcatattcagtgcccggcgacggaggtcgtctggctatgtctgttcctgaaagagtgccgccattatcgccagcggatcgacgccagtcccgactgcggcgtcattttaatcgcccacggcgcgacgacggcgaccagtcaggcgcagtacgtcaaccgggtgctggagcgcgagctgttcagcgccatcgatatgccctttgagcagtcggtgcatgacacgctggaaacgctaacccagcggatccagagccaacgctaccggcggctgattctgatggtggatatcggctcgctggtgcattttggcagcaccatcagcaagctattccagattgacgtcctgttaatgcccaatattacgctgaccagtctgctggagctgggtctggatttaagctatgaaaccagcgagctaccgcagctggcggaattactgcagagtaaaaatatcccctgtcagctctgtactccgcagcaggagaacggcggtaaggtgctggtgatctcctgcattaccggcatgggaaccgcagagaaaatcaaaaaagtgctggaggaaagttttggcgagctgatgtcgcaggatacgcgaatggtgatcctcgattacaacgaggttcgcagcctggagcgcgttcagcagtcgctgctggccggtgagcgactggcggggattgtcggcaccttccagccggggctgccggatattccgtttatctcacttgaagagctgttctccgagcaggggccggaactggtgctcagcctgctcacgccggacctctcaagcagtgagcgccgtctggagatggagcgcagcgcgatgcgcttcatcagcgcgctgaccatggaaagcatcatcaaccatatttcggtactcaatccccagcgcattctcaaagagatggagggggtgtttaaccatttaaccacctcgctttcgctgaaacccagccgccaggtgacactgcgcttcctgatccactgctgttgcatggtcgagcgtatcgtaattaaccggaaaccgttacagatgtcgctggagagccagcccgcgctggacgtccgcgcgtttagtgtcattaaatccgccttccagccgatcgaagaggcttatgccattcgtttatccgacgcggaatatttttatatctacgaactgctgtatcgctgatcccttaactggcgtggctttacgccgcgcctgcccctcttcgccccccatgtgacacaaattctggcacagcctttgctcttattacgtatatcaacgtaatagcgccaggaggccattttgattaccactgaacctttgtcccagatcctgctgctgacccatggcggctggggacagcagctctgcaacagcctgtgcatggtgacgggcgaaattaaaggcgtaacggaaatcgccctgatgcccgtcgataccttgggcgagttttatcagcgcgtagaagccgtcgtgaaaaccctgcccgaaggctcgcttattctgaccgattttattggcgggaccacctctaacgtggccgcgcggctaagcgccgattatccggtggcggtgatttccggactgaatgcctcgctgctgctggaggccctggacaagcgggaacaggggccactatccgcctgcgtagctgaattagtggaagccgcgcgcagcagctgtctggacgttgtcgcccacgttcggcaattacaacaatcacaataaggaaaaaatatcatggctaacatcgtgttatgtcgcatcgacagccgcctcattcatggacaagtggtgacgaagtgggtcggacaatcccaggccaaccggattgcggtagtgagtgatgagctggacgccgatccgtttatgaaaaatatctatctgatggcggcaccgccaaacatcaaagtggattgctacagcaatcagagctttgccgcatcgtggaaagaaaaccagcttggcgacggcagcgtgatggtgctgttcccctctctcgcggcgattcaggaagccgtacagctcgggtttgatgtttccgccattcaggttggcggcttaggcggcgggccgaaccgcaaggtcgttttccagaacatcacgttggatgaaaaagacgttggcattcttctcgacctgaaaagtcgagggattaaggcggtcttccagactatcccggaagataagccgcagtcgctggacgatatcctgaaaaaattctaatcctctgattacagggtaaataactatggatactttagtcttcgcaagcctgatggggttgtattactggtttgcccgcttacgccttggctacaccttctccgccatgctgttacaacctgttgtaatcgccgtttttgtcggcctgctgttgggcaatatggaaacggcaatgattattggcgcaggtatgcagctggtttacctcggcgtgacctcaacgcccgggggtaacgtgccgtcagatccggcgctggcggcctgtatctcgattcctatcgccgtaaaagccgggatggacccgaacctggccatcgcgctggccatcccgtttggcgtgatcggcgttttccttgaccagctcagacgcacgctgaacgccgcgtgggtgcatatggcggataaacacgcggaaacggccaacatgggcggtattatgcgctgcgcgttcctctacccggcgttgctcggcctggtgctgcgtttcccggtggtgtttgctgccaactattttggccaggacgtggtagagagcttccttaagctgatgccgcactggttgacccactcctttgaaattatgggcggaattctgccggcgctgggctttgccatcaccatcatggtgatcggtaagaagagcctgctgccgtggtttatcggcggattctttgcggtgctgtacctgaaggtggacatcatggcgatggcaatctttggtacctgcgtggccttcctgattaaaggcctggcgaaaaatgaaggagcagcatgatgagtagcgacgtaatgcagcatgaactggtggagcgcgcgcgggagaacggcacgctgaccaaagcggacatcaccaaagcctggtttatttactggctgggcgcggaagtttccagctcctatgagcgtttacaaagcctgattttctgcgcctcaatgacgccgattatcaaaaaactctacccgcaaaaagaagagcaggtggaggcgctaaaacgccatctgaacttcttcaactctgagcagacctttggcgcggtgattcaggggatctcgattgcgatggaggagcagaaaacccgcggtgaaccgattagcgacgcgtctatcaccgggattaaaaccgggctgatggggccgctggccggaatgggggactccatcatctgggcggccgtcatgccgttgctgattgcgattttcatcccgttcgccgccagcggcagcgcgatgggcggcattgtgcccttaattctctatccggccattacgctggcgatcagctacggcatggtgcacaaaggctacacgctgggacgcgactcaatcatcggcctgctccagggagggcgaattaaggagcttatctacggcgcgaacgtgctgggcctgataatgatgggcgcgctctccgcaagctacgtcaaaataacgacccccttaaagctcagcgcgctgaagggctcggaggtggtggtccagcaaatcctcgactctatcgcgcccggcctgttgccgctggcggcggtgtttgccatctacttctatctggtgaagaaagggccgcgctacaccaccattctgctgtcaattgtcgcgctcagcgtggtctgttcgctgctgggagtgctgtaaaccatgacgcagaatatctatcaacagctggggttaaaacaggtgattaacgcctgcggcaaaatgacgattctgggcgtttccagcgtggcgccggaggtgatgcaggcaacggcgcgggcggcatcggcctttgtggaaatcgacagcctggtagaccgaaccggcgagcgggtctcccgctttaccggcgcggaggacagctatatcacctcctgcgcctcggcgggaatcgccatcgccgtggccgccgcgattacccatggcgaccaggcgcgagtgatgcagatgccggacagtcgcggtatggccaacgaagtcgtcatgctccgcgggcataacgtcgattacggcgcgcccatcaccagcgcgattcgcttaggcggtgggcgcgttgtggaggtcggttcaagcaatctggcggcgcgctggcagctggagagcgcgatctctgccagcaccgccgccctgctgtatgtgaaatcacaccactgcgtgcaaaaagggatgttgagtatcgaggatttcgtgcaggtcgcacagactcacaacctgccgctgattgtcgatgccgccgccgaggaggatttacgcgtctgggcggcgagcggagcggacatggttatctatagcggggcaaaagcgtttaacgcgcccacctccggattcatcaccgggaaaaaacagtggatagcggcgtgtaaggcgcagcatcacggtattgcccgggcgatgaaaatcggcaaggagaatatggtcggtctggtttatgcgctggaacactatcatcaggggcagaagggggtcactgccgaggaactcctgcccgtcgcgaaagcgatctcagcgataaacggcttacaagccgatattgagcaggatgaagccggacgcgctatctggcgtatccgcattcaggtgaatgcccaggaactcggcctggatgcccgcgaagtcgaagcacagctgcgcaatggcgatatcgccatttacgcccggcgctataacctccatcagggggtttttagcctggacccacgaacggtagccgagggtgaaatgagcctgatcgtggcgcgcctaaaggagattgcagaccatgcagcaaattaatttttaccgtcaacgcgtcgcgattaacgtgctggcgaaagatatcgccaacgcccgggacatttatgatgccgccgaaggccatgcggcgattggcgtcctctcggcacagtttgcctccgtggaagaaggtgttcaggaggtaaaacgctggatggcggagataccctccatctccgtaggcctgggcgccggcgatcctgcgcagtattacaaagcggcgatgatcgcgtcagcgcttcacccggcgcacgttaatcagacctttaccggctgcgggtttgccgcaggggcgctggcggctacgggggggcagcaaacctgcattaacgcgctggtcagcccgacgggaacccctggcgaggttcttatctccaccggcgtcagcagctgtcagggcacgccggcccgcgtctcctgcgatgcggcggtacgcatgatgcaggacatgggggcccatgcggcgaagtttttccccatgggcggcgaaaagtcgttaccggagctgtatatgctggcgaccacggcagcccgtaacgggatgacgttaatcgaaccaaccggcggaatcgatctcgataactttggcattattttgcaaagctgtctggaagcaggcgtacctcgcgtgatgccccatgtttacagctcgataatcgacccgcaaaccggcaatacccggccagaagatatccgcagattaatggatatcgtgaaagccgtggtctgaataaaaaacaccaggccgtagcccgggcaggcaggccatcaccaacgaagaatgtcccggaggcggcgctggcgcgccatgtccgggctaccagccctcagacgacgatgaacctgtagcccggctaagcgtagcgcgagccgggagatttcgcgaaatttaaacctgcccgacgtacaaataaatggccaggaagtggcacacgctgccgcccaggacaaaaccgtgccagatagcgtggttgtacggaatacgtttgcagacgtagaaaataacccccagcgaatagaccacgccacccacggcaagcagcgtcacgccgcccaccgccagcttaatcgccagctgataaacgacgatcagcgacagccagcccatggtcaggtaggtcactaaagagaggatcttaaaacgatgcgcaatggtcagcttaaacaggatccccagcagcgccaggctccagatgacgatcatcagcccacgcgatagcggcgaatttagccccaccagcagaaacggcgtgtaggtcccggcaatcagcaaatagatggcgcagtggtcgaattttttcagccacagcttagcccgctgatgcggaatcgcgtgatagagggtcgaggcgaggaacagcaaaatcatgctgccgccgtacaggctgtagctggtaatggccgtggcgccggcgttgctgtccaccgcctgcaccagcagcagcaccagaccgacgataccgaacaccagcccaatcccgtgactgacgctgttggcaatttcctctgccagagaatatccctgtgtgattaacgatttgcgacccatatttgactccgaaaacaagtacgctttcaatgcacacttaggttaactgagaatgattccagtgaacacctgttcgctaaaataaaaagatgaatatttatgaacagtataaaatcaataggttacataaaaatttcaactaacagacgttcactgtttatttaaagcttttcgaattcaataacataaaactgcttttcttcaggatagatctccgcaatcacctcacgcagctgcgccagggtcatattctcctgctgcgcgtgcagttcactcagcgtatccagcgtcaccgttgaggtggccaccacgcgaatggtgcaaaaatagccgtcatcttcatagcggccaacgcgcaacacatcgcccgttttaaagagtgattcagccgcatcgcggagggtaatggttttgcgtccggcgaggatgtcgtcctgaaaacgctgaaaaaaggttatgtcatttggctgcatgatatcattccgtcctggtcattatgaattgtgagttcgccactgtgagtatcttctcccacgccgctatcgccagtctcaataaccttgagatgatggtctatcactacgtcattaaaaatcgcgacaaagtgatgtacatgaccatccgcgagctggcggaagcggccggagtctccacgactaccgttttgcgcttctgccgcaagctgcagtgcgaaggctactcggagtttcgcgtacgctttaaattatatctggagcagaatgagcctcaacaggcaaatatcggcgccagcgaaataatgagcttttttaaaagcgttaataacgatgaatttgaccagctgctcgagcaggcggtcgatattattctgtcttcagaacgtattatttttgttggcgccggcacctccggcgcgctggcaaaatatggcgcgcgtttcttttctaacgtcgggaaattcagtaaccatatcgacgacccttatttcccggtgaccaatgatatggcgcgtaatgcgctggccatcgtgctgtcggtctccggcgaaaccgaagagatcctgcgcttcgccagccagttcagcctgcatcgctgtaaagtgatgtccatcaccagccacgagcactcgcggctggcaaagcttgccgactttaatctctcctggcacgttccgcaaacgcgcatcggcggcgtctatgacattaccacccagatcccggtcatttatattctggaaacgctggggcgtaaattagcgcgcaaactcgcctgaaaataacagggtgttttttcgatgtaacaaattccattccgggcaaattgttatatcgtgacatttatattccctttgttagactcgcagccaacaagtcattaagacgagatgagcaaagatgaagaaaattcctttaccaaaagactttttatggggtggcgccgtcgccgcgcaccaggttgaaggcggctggaataaagacggcaaaggcccgagcatctgcgacgtgcttaccggcggcgcgcacggcgtgccgcgcgagataacccagcaggtagagccgggcaagtactatccgaaccacgaagccatcgatttccacggccgctacaaagaagacatcaagctgttcgccgagataggcttcaagtgcttccgcacctctatcgcctggacgcgcatcttcccgctgggcgacgaaagccagccgaatgaagaagggctgaaattctacgatgacatgttcgatgaactgctgaagtacaacatcgaaccggttattaccctctcccactttgagatgccgctgcatctggttcagcagtacggcggctggaccaaccgcaaagtggtcgatttctttgtgcgcttcgccgaagtggtcttcgagcgctataagcacaaagtgaaatactggatgacctttaacgagatcaacaaccagcgtaactggcgcgcgccgctgtttggctactgctgctccggcgtggtctataccgagcatgaaaacccggaagagaccatgtaccaggtgctgcaccatcagtttgtcgccagcgcgctggcggtgaaggcagcgcgtcaaatcaatccggagatgcaggtgggctgcatgctggcaatggtcgccctctatccgttctcctgcaagccggaagacgtgatgtttgcccaggaatcaatgcgtgaacgctacgtctttaccgacgtccagctgcgcggctactacccgagctacgtcctgaacgaatgggaacgccgcggcttcaatatcaacatggaggacggcgatgcgcaaatcctgcgcgaaggcacctgcgcgtatctcggcttcagctactacatgaccaacgcggtgaaagcggaaggcggcaccggcgacgcgatctccggctttgaaggcagcgtgcccaacccgcacgtcaaagcctccgactggggctggcagattgacccggtcggcctgcgctatgcgctgtgtgaactgtatgagcgctaccagaagccgctgtttatcgtcgaaaacggcttcggcgcgtacgataaagtcgaggaagacggcagcatcaacgacgactatcgcatcgactatctgcgcgctcacgtcgaagagatgatcaaagcggtgacttacgacggcgttgagctaatgggctataccccgtggggctgcatcgactgcgtctccttcacgaccggtcagtacagcaagcgctacggctttatctacgtcaacaaacatgacgatggtaccggcgatatgtcccgctcgcgcaagaagagctttaactggtacaaagaggttatcgccagcaacggcgagaaactgtaatcatcttgcccctttccagccggaagggggcaaaacttcccacaaaacagacacttctttacagctttagcattgctaacccacgctcagccgataagataaaccacattaatcgttgagtcgctgacgctgacttcgtgaatcaacgccgcacgctgccggcctttccggcgcatcacaatgtagaaaaatgatgctaaacctcttcagacagatcctgatatggctgctgattgtcgccgccgtcagcctggcggtggattacctgcgcaggcccgcgctgccgcagaatttctccagcatgccgctgcaaacgcttgatggccgaacggtcgatctggcggcaatgagccacgagcgccctttgctgctgtacgtctgggccacctggtgcggcgtttgccgctataccaccccgtcggtggccgctttagccaacgatggcggcaatgtgatgacggtagcgctacgctccggcgacaacgccgctctggcgcgatggctggcgcataaaaaaatggcgctgccgacgatcaatgacgccagcggtcagctatcccaacggtgggaggtgcaggtcacgccgacccttatcgttatctcgcgcggcgaggtgaagtcagtcaccaccggctggaccagcggctgggggatgcgcctgcggctgtggctggcgtcgtagcgcatttccctgcttgcgctgcgcttagcagggccagggatggggtgaggtaaacagatgttgtatcccgggcaaggcgttagccgccccccggaaaacgagttccgattatctcccgcccgccagctccagaaagctgccggtcacgtaggaagccttctcactcagcagccagacgatggcctgagccacctcctccggctgcccgccgcgccgcatgggcagcatcgacttcacgcgatccacgcgccccggctcaccgccgctggcgtgcatgtcggtataaattaagccgggacgcacgccgttaacccgaatcccctgcgccgccacctccagcgacaggccggtggtcagagtatcaaccgcgccctttgacgcggcataatccacatactcccccggcgccccgaggcgcgatgctgcggatgaaacattcacaatcgccccacctttaccgccatgcttgtgcgacatccgctttaccgcctccaggcagcaaaggaagtagccggtaacattggtggccagcacccggttaattcgctcggcgcaaaggctttcaatcgtcccctgggtaaataaaatcccggcgttattgaccagcgcggaaagcggttcaccgaggcggtcgatagcggcgaacatcgccatcacctgcgcttcatcgctgacgtccgcccgtagcgcaacggctttgccaccgctggcgataatttcgttcaccacgccggtcgcggcagcgctattttggtggtaattcaccgccacggtatagccttcctgcgccagcagcagcgccgtcgctttacctattccccggctgccgcccgtcaccaaagctatcgtcatgccattctcccaaaaaataaaggcgccgcagcgcctttaaaagatagtctaatcagcaaattactggtattcgctcatcggcacgcaggagcagaacaggttacggtcgccgtaaacatcgtccagacgcttaacggtcggccagtacttgttgttcagccccgccgggaagaccgccagttcacgggtgtacggatggttccactcgctcaccagttcaccctgagtatgcggcgcgttcaccagcgggttatcctccagcggccattcaccgcctttcacgcggtcgatctcgccgcgaatcgccagcatcgcatcgataaagcggtccagctccactttgctttccgattcggtcggttccaccatcagcgtgccggcaaccgggaaggacatggtcggagcgtggaaaccaaaatcaatcagtcgcttggcaatatccagctcgctgatgccggtctcttctttcagcggacgaatatccagaatacattcgtgcgccacgcgaccgtcgcggccggtatacagcaccgggaacgcgtctttcagccgggtagcgatgtagttggcgttcagaatcgccatctggctcgcctgtttcagcccctctgcgcccatcatacggatatacatccagctgatcggcagaatggaggcgctgccaaacggcgcggcggaaaccgcgccctggcgggtcagcatgccttcaatttgcaccacgctgtggcccggcacaaacggcgcgaggtgcgatttcacgccgatcggccccatacccgggccgccgccgccgtgcggaatgcagaaggttttatgcaggttgaggtgcgagacgtccgcgccgataaagcccggagaggtaatgccgacctgggcgttcatgttcgcgccgtcaaggtaaacctggccgccaaactgatgcaccacttcgcacacttcgcgaatagtctcttcataaacgccgtgggtggacggataggtgaccataatgcaggagaggttcgccgcatgctgctcggctttcgcccgcagatccgccagatcgatgttgccatttttatcgcaggcgaccaccaccacctgcattcccgccatctgcgcggaagccgggttggtgccgtgcgcagagcttgggatcaggcagatatcgcgatgcccttcgttgcggctctcgtggtaatggcgaatcgccagcaggcccgcgtattcgccctgcgcgccggagttcggctgcatgcagaccgcatcatagccggtcagcttaaccagccagtcggagagctgggcaatcatctgatgatagccttcggcctggtcaaccgggcagaacggatgcagttcggcgaattccggccaggtgatcgggatcatctcggcggcggcattcagcttcatggtgcaggagcccagcgggatcatcgcctggttcagcgccagatccttacgctccagcgcgtgcatatagcgcatcatctcggtttcgctgtggtagcggttgaacaccggatgagtgaggatcgcatcgtcacgcagcatgctggccgggatcgaacggctgtccagggccacgtctttatccagcgtgtcgatatccaggccgtgatcgtcgcccacgatggcgcggaacaggttcaggacgtcttcgcgcgtggtggcttcatcgagcgtgatcccgacggcgtgatgaatatcgctgcgcaggttgatctgcagcgcttccgcccgcgccagcacagcggctttatcggcgacgtccacgcacagggtatcgaagtagtgagcatggcggagcttaagaccttttttctgcaggccatcggcgagaatatcggtcaggcgatgaatacggctggcgatacgcttcaggccggccgggccgtggaacacggcgtacaggctggcaatattggccagcagcacctgggaggtacagatattggagttcgctttctcgcggcgaatatgctgctcgcgcgtctgcatcgccatgcgcagcgcggtattacccgccgcatctttcgatacgccgataatacggcccggcatggagcgtttgaattcatcttttgcggcaaaaaacgccgcgtgcgggccgccgtagcccatcggtacgccgaagcgctgggcggagccaaacacaatgtccgcgccctgcttgccgggggcagtcagcagaaccagggccataaaatcggccgcgacgctgacaatcactttgcgcgctttcaggtcagctatcagtttgctgtaatcgtgaacctcgccggtggtgcctacctgctgcagcagcacgccaaagacgtcctgatggtcgagcgctttttccgcatcatcgacaatcacatcgaaaccaaaggtttccgcgcgggtgcgcaccacgtccagcgtttgcggatgaacgtcggcggcgacgaagaaacggttggcgtttttcagtttgcttacgcgtttggccattgccatcgcttccgcagcggcggtggcttcgtcgagcagcgaggccgaggcaatatcgagcccggtcaggtcgagggtcacctgctggaaattcagcagtgattccaggcgaccctgggaaacctccggctgataaggcgtataggcggtataccagcccggattttccagcatgttgcgctgaatcaccggcggcagctgcacggcggtgtagcccatgccaatgtacgacttgaagcgcttgttacgaccggcgatcgccttcagttccgccagcgcggcgaattccgtggttgcttcgcccacctgcggcggcgttgccagctggatatcctgcggcacaatctggccaatcagggcgttaagcgaatcggcgccaacggttttcagcatctcctgctgctgccgggcatccgggccgatgtgacgttcaataaaggcgtcacggttttcaagctggcctaaagtctgggtcatgagcgatggttcctgaacgtgcggtgaatcgtgattgtctgacgggtttgcccggcgagcactgacgctaaccgggccagaagacgcaaatcattcgcgttgcaggaagccaacgcccctgcaacgtgaaggatgaagcgtatttattcgtcttctaacagagcttcatatgcggtcgcatccagcagcgcggcaacctgagcttcatcgctggctttgattttaaagatccagccgccggcgtacggctcgctgttgaccagctcaggggagtcgttcagctcttcattgacggcaacaatttcgccgctaatcggcgcgtagatatcggaagcggctttgacggattcggcaaccgcgcagtctgcgcccgcttctacggcggcgcccacttccggcaggtcaacgaaaaccatatcgccaagcagctcctgcgcgtgctcggtgataccgacggtataggtgccgtccgcttctttacgcagccattcgtgttctttgctgtatttcagttctgctggtacgttgctcatcaattcatctccaaatgggaaatcacaccacggctttgccgttgcgtacaaaaacgggtttcgtcactttgaccggcatttcgcgattgcgaatctgcaccacggcggtttcaccgatgccttccggtacgcgcgctaaggcaatactgtagcccagcgtcggggagaaggtgccgctggtgataatgccttctttctgattgccatcggcatcgctgaagcgcaccggcaggccgccgcgcagaacgcctttctcggtcatcaccaggccgaccagctgttcggtgcctttttcacgctggagttccagcgcttcacgcccgataaaatcacggtcagccggttcccaggcaatggtccagcccatgttagccgccagcggagagacgccttcgtccatctcctggccataaagattcatgcccgcttccaggcgcagcgtatcgcgcgcgccaaggccgcacggcttaacgcccgcgtccagcaggccgcgccagaaatccaccgcctgctcgttcggcagcgcgatttcataacccgcttcaccggtatagccggtagtcgcaataaacagatcgcccgcctgcacgccaaagaacggcttcatgccttccacggcctggcgctgcgcgtcggtaaacagcgtcgccgctttctctttcgcctttggaccctgtacggcgatcagggagagatcgtcacgcacggttatctcaagaccataggattcagactgttgggtgatccaggcgaggtctttttcacgggtggcggagttaacaacgaggcggaaatagtcttcagaaaggaaataaacaatcaggtcatcaatgacgccgccggaggcggtcagcatgccgctatagagcgctttgcccggcacggtgagcttcgccacgtcgttagccagcagatagcgcaggaactcgcggattcggctgccgtgaaaatcgacgatggtcatgtgcgacacatcgaacattccggcatcaccgcgcaccgcatgatgctcatcgatctgggatccgtaatgcagcggcatcatccagccatggaaatccaccatgcgcgcgccgcatagcgtgtgttgttcaaacaacggagtctgttgagccatcttttcctcatcgaataaaacggaaccagccacgatttttggcgtttttgcgccgcgaaaaacgccgccagcatcgctaaaggacgccgacgcaaacgttctctttggcctgaacttaccaccgatatccgcactaaaccataagcctggtcaggacatcacattagcttatgaccaaaatcagccgcagagcctacagagtttttatctacaaaaaagcgattcaatccgcacaaaaccaaactaattagttaaaaaagcagcgaatgatgatattttctgcgaaatgacgagcctaatttctataacaaaaaaaaggtaacattaataaaactaatgcgaaaaacgaggtgaaattagattatttcaaatgagaggggataacccggcgcggcggccgggtgagagaagtgtgacgtacttaacgtaaccaggcgggcaggtcgttgaggcccatcgcttgacggataagctgcggcttcacgccgggcaatgtatccgccagcttaagaccgatatcgcgcagcagcttcttcgccggattgtggccggagaacatgtcgcgaaagccctgcatccccgccagcatcagcgcagcgctatgtttacggctgcgttcatagcgacgcagatacagatgctggccgatatccttgccctgcgcgtgcaggcgcttcagttcgtcgatcagctcggcggcatccataaagccaagattgacgccctgccccgccagcggatgaatggtatgggcggcatcgccgaccagcgccagacgatgggcagcaaactgacgcgcatagcggccggtgagcgggaagacctggcgctcgctctccacggcgcataagccgaggcggttatcgaaggcaatattcagcgcctggttaaaagcggcatcgtccgcctgccgcatgcgctcagcctcttcgggagagagcgaccagacaatcgagcaaagatgcggatcgctcagcggcagaaacgccagaatcccttcgccgtggaacgcctgacgcgccaccgcttcgtgcggttcttcggtgcgaatagtggcaaccagcgcgtgatggtgataatcccagtaggtcagcgggatatcggctttattgcgcaaccatgaattggccccatcggcgccaaccaccagccgggcggttaacatcgtgccgtcctgcaggctaagaaaggcctcgttctccccccacgcaacctgctgcagctgcgccggagccagcagagtgacgtccgcgcagcgctgcgctttttgccacagggcgtggtgaatcacggcgttttcaataatatgcccaaggtggctaaagcccatgctctggtcatcaaagctgatgcggccaaaactgtctttatcccacacttccataccgtggtagcagctggcgcgctgggcgataatatcctgccagacgcccagtttgctcagcagcttctcgctggcggcgttaaccgccgacacccgcagcgccggcggcgcatccgcgcttaacggctgaggcgcggcctgttccagcaccgcaacgcgcagcccgctgccctgcaaaccgcaggcaaccgccagccccaccattccaccgccaacaatagcgacatcaacactttgcacgtttcactccttaacggggaacccaaccgagggtacgctgcgccagcgcatcgcgcgccggggtaaataattccatcgccatcaggccgacgttgcgccccaccaccagcggcgcccagcgattggcgaacagatgcaccagcccatcggtcacgccgacggtggcggctttatctgcggcgcgtcgggtctgatagcggctcagaagcagatagccgcccggatcctctccttctgcctgcgcctgcgccagcatttccgccaggctcatgacatcgcgcagaccgaggttaaatccctgcccggcaataggatgcagcgtttgcgccgcgttgccgaccagcgccagccgatgcgcaaccgtgcggctggctcgggtgagcgagagcggatacacgctgcgctttccggcgtggacgatccggccaagacgccagccgaatgcctgctgaagctcatggcggaagcgttcgtccgaccagctcagcacctcttcacgccgcgactgcggatgacaccacaccagcgagcagcggccctgcgacatgggcagcatcgccagcgggccgtgtggggtaaagcgttcaaacgcgcgcccgctatgcggctgcgcggtactgacgttggcgataatcgccagctgttcatagggttcctgctgccagctgataccgcagcgggcccccagcgtcgagcgcgagccgtcggcggcgaccagcagtttaccgctgagggtttcgccgttgtccagaaccaggctgacgctctcttcgctgcggctgacattttccacctttgccgggcagtgtagcgtcacgcccggcgccttgcgcagctgcgcaaacaggcgctggccgacatcgtgcagctcgaccacctggcccagcgccgccagcccatactcctcagcctcgagcgtcacaaaccccgcgtggccgcgatcgctgacgtgaacgcgctgaatggccgtggcgcagtcggctatctcttgccagatatcaacgcgagccagttgctggcaggtgccggcagccagagcgatggcgcgggcgtcaaagcccggatgctgcgcggaatccggcgcagatgcttcaaccagatgcaccggcagcgtaccgccggtcaggcgagatatcgctagcgccagcgtcgcgccggtcattcctccgccgacgatcaggatgctcatagctggcgcgccgccgccatcagcgcctcgatatcgtccgcttttttcactacgccggcggtgaggttctcattaccgtcttcggtaatgacgatgtcgtcttcaatacgaatgccgatgccgcggtactgggccggcacgtcggcatccgtcgcaatatacagccccggttcaacggtcagcaccattcccggctcaagaatacgcgagcggtcaacgtcatagctgccgacatcatgcacgtcgagccccagccagtggctcaggccatgcataaagaaaggtcgatgggcgttattggcaatcagctcatcaatttcacctttcaggatccccagacgcacgaggccggtaatcataatccgcaccacctgctggttaacctctttaattgaggtacccgggcgatagagcttcagcgaggtttccagagattcaaggacgatatcgtaaatctctcgctgggccgggctaaatttgccgttaaccgggaaggtgcgggtgatatcgcccgcgtagccgcggtattcgcagcctgcgtcaatcagcaccagatcgccgtcgcgcagctcgcactcattttcggtgtagtgcaggatgcagccattttcgccgccgcccacgatggtgttataagaaggaaagcgcgcgccgtgacggttgaattcgtgaaggatctcgccttccagatgatattcgaacatcccgggacggcatttttccatagcgcgggtgtgggccagcgcggagatctcccctgcgcggcgcatgacctccagctcttctgccgatttaaacaggcgcatctcatgcaccatcggccgccagtcaatgaccgagcctggcgcctgcagattctgccgtacgcctttgcgcagtttttccagcgcgttaaacacgatgtcgtcggcgtaggcatattcgccctgggcaaagtagatagcgtcgaggccgttaaggagctggaacagctgctgattgatttcactaaatgccagcgcgcgatcgacgcccagcttcgcgggggcagcttcctgcccgaggcggcggccaaaccagatttcagcggtcagatcgcgcacgcggttaaacaacacgctgtggttgtgcgtctcatcgcttttaatcaataccaacagcgcttctggctcattaaagccggtgaagtaccaaaaatcgctgctctgccggtagggatattctgaatctgcgctgcgtaccgcttccggcgcggcgaaaatgagcgctgcgctgcccggctgcatctgcgccagtagagcctggcgacgagagagaaattcctgctgagtcatgacgccccctgaacgatttaatgaatgattagtgtagcgtcggcttttgaacttccggcgcagtgggtttctgaagagagaaggtgtcgtggcacagcagcgcagcaacgcgtacgtattcgataatctcctccagagacatttcgagctcttcctgatcctcgtcttcgtcatacccgagctgagcaatattgcgcagatcgtcgatggcttcacccgtttcgtctttgattttatccagcttaggctgcgtcacgcccagcccaagcagaaaatggttcacccaacccgcgagcgcatcggcgcgatcgaacacgctcacctcgtcgccatccggcaggtagagctggaataagaaaccgtcatcctccagcgagtcgctggtggcggaatgcatgttacgcagcgcctgcgccagctcgtgaccaaaagccagaccttcgttagtcagatcgtgcaccaacggctgccagctgctgtctttgttgccgccgcacaggatcccgctaatcaaaccgtgcatttcggcaggggttaatcctaccccttgttggttcagtaactggtctacagcgttgtagccaggcatttcgttctgtatagacatgcgcattcgtcatcgttgggaggaatattcatgatatgctaccactttggaccctggtgaaccagaatagggcttgtatcttaaaaccagggtagctatagtgtcgccccttcgcagaccctcccagggcgtgaaggccgcgcagtcaatcagcaggaaggtggcatgtctgcacaacccgtagatctccaaatttttggccgttcactacgagtgaattgcccgcctgaacaaagggatgccttaaaccaggcagctgacgacctgaatcagcggttgcaagatttaaaagaacgcactagagtcacaaatactgagcagctggtcttcatcgccgcgttgaacatcagctatgagttgactcaggaaaaagcgaaaacccgcgactacgccgccagcatggagcagcgtattcggatgcttcagcagaccatcgaacaagcattgcttgagcaaggtcgcataagcgaaagacccgggcagaagtttgaataacactttgcatttaactgtgttagagtaatcgcaagaacaaaatttctctgagatgtttgcaagcgggccagtcccctgagccgatatttcataccacaagaatgtggcgctccacggttggtgagcatgctcggcccgtccgagaagccttaaaactgtgacgacacattcaccttgaaccaagggttcaagggttacagcctgcggcggcatctcggagattcccttctttttcgtttcatccccccctaagttaattttcggcttttgccgtcgtgtattagactacgcctgttggtatcgtttgctcaccgatgagactcaggtatgaccctattgtcagatatcccctttaccaggcagcaaattcgtcagcagatccgccagcgccgacgcgcgttaacgccggagcagcaaacccagttcgccctccatgcggcggacagaatgatggcgtatccgccggttctgctcgcgcagacggtcgcggtatttctttcgtttgatggcgagctggatacgcggccgctgattgatcagctctggcgggcaggcaaacgggtctatctccccgtgcttcatccgttcagccccggcaatcttctgtttctgcactaccacccaagcagcgatctggtggtgaatcgtctgaacatccgcgaaccgaagctcgacgtgcgcgatgtcctcccgcttagccagctggatgtactggtaacgccgctggtcgcgtttgatgccgccggacagcgcctgggtatgggcggcggattttacgaccggacgctgcaaaactggcggcagcatcgcctgcagccggtcggctacgcgcatgattgccagcaggtcgacgcgctgccgacggagcagtgggatatcccgctgccagcggtcatcactccgtcaaaaacctggctctggtaaaacgtccgaacaattgacattgctgattttttcacctaaattcctggataaagggtgagggaggcgaacctccctcctgcattctctctgttaatatgctggccaggcgatgattaacaggataagcagcatgatgaagagtctcatcatcgtccctttccttttagagcccctgcctcggtaggggctttcccgtttcagccccacgctgagtctttatcgtaaatccctttctttcaggcacaacgacatccgacggttttaatcgccgtttgcggcaagcctcgctaagcgtttgagtggcgacgggaaattgcagaagggtctatcaggagaaaaggggcaggtcgatgacctgcccgctggcataaaaggagttagaacagcagacgggcgcggatggtaccaggaatagccttcatcgcctgcagcgcgctctgcgcgacatcttcttcggcttcgatatcaatgaccacgtagcccatttgcggagtggtctgcagatactgcgccgcgatgttaatgccctgcgcggcgaaaatctggttaattgcggtcagaacgcccggacggttttcatggatatgcagcagacggcgcccgccgtgcagcggcagcgacacttccgggaagttaaccgcggagagcgtagaaccgttatcggagtatttcgccagcttgcccgccacttccagaccgatgttttcctgcgcttcctgagttgagccgccaatgtgcggggtcaggataacgttgtcgaactcacagagcggagagttgaacggatcgctgttggtcgccggctcggtcgggaagacgtcgatcgccgcgcccgccaggtgcttgctcgccagcgcatcgcacagcgccgggatatccaccacggtgccgcgagaggcgttgatcagcagcgcgccgggtttcatcagcgccagctcttccgcgccaatcatgttcttcgtggaggcgttttccggcacgtgcaggctcaccacatcgctcatgttcaacaaatcagaaagatgctggacctgagtcgcgttacctaacggcagcttgctttcaatatcgtagaaatagacatgcatccccagcgattcggccagaatacccagctgcgtgccgatatgaccatagccgataatacccagctttttgccgcgcgcttcaaagctgccgaccgccagcttgttccatacgccgcggtgcgctttggcatttgccgccggtacgccgcggagcataagcagcagttcgccgatcaccagttcagcaacggaacgggtattggagaacggggcgttaaacaccgggataccgcgtttcgccgccgcgtttaaatcaacctgattggtaccgatacagaagcagccaaccgcgaccagcttctccgccgccgcgaagatctcttcagtcagatgagtacgggaacgcaggccgatgaaatgggcatcacggatggacgctttcagctcttcgctatccagcgcgcctttatgaaattcgatattggtgtagcccgctgcgcgaaggctgtccaccgctttttggtgcacaccttcaaccagcagaaatttaatcttgtctttttccagtgataccttagccatttccccgtcctgtttttgtcttaactgatgtcgtgcggaacgaaagttcttctcagcaacatatcaaaaaaaactattgcggcaatatgaacgtttgcgtcggcaacctgaagaaatatcaatcagcgggaaatagcaggacaaaacaccagaaagtaaaagaaaggtagattgttactaagacaaggcgcgtaaatgtgacagaagtcaccaaaataggcctggagaaaaaatatttgcgaggaagcgattcgctccctcggatcagactatttagtgatggtttttacaccatcagcggtgccaatcagcgcgacgtccgcaccgcgattcgcaaacaggccgacggtcacgacgcccggaataccgttaatggtattttccagcgcaatagcgtccagaatttccagaccaaacacatcgaggatcacgttgccgttatcggtcacgacgccctgacgatactccggacggccgcccagcttaaccagctgacgcgccacggcgctgcgcgccatcgggatcacttccaccggcagcgggaatttacccagaatatccacctgcttggaagcatcggcgatacagataaatttgtcggcgaccgaagcgataattttctcacgcgtcagggctgcgccaccgcccttgatcatctgcatgtggccgttgatttcatctgcgccgtccacgtaaataccaagacgatcaacgctgttcagatcaaaaaccgtaataccgaggcttttcagtttttcagtagaggcatcagagctggaaaccgccccttcaatctgccctttcatggtacccagcgcatcgataaagtgcgccgccgtcgagcccgtaccgaccccaacgatagtgcccggttgtacatactgcagtgccgcccagcctaccgcttttttcagttcatcttgcgtcatgattatggtccgagatgtgaattcctgaggcgcattatagaacatcaggggggtcattgtccctgcgacggcgatcacacaacgcggtcgccaatttttcatcttcatcaaaaacaaatttatgtcatagtgcgagttaacgaaaagtattagggggcacgccagagcaatgaaacgaccggactacagaacactacaggcgctggacgcggtaatcagggaacgagggtttgagcgcgccgcgcagaagctttgtattacgcagtccgccgtctctcagcgcatcaaacagctggaaaacatgtttggacaaccgctgctggtgcgaaccgtaccgccgcgtcccaccgaacaggggcaaaagctgctggccctgctgcgtcaggtcgaactgctggaagaggagtggctgggcgatgaacaaactggctccacgccgctgctgctatcgctggcggtcaacgccgacagcctggccacctggctgctgcccgcgctctccagcgtgctttccgactcccctattcggctgaacctgcaggtggaagatgagacccggacccaggaacgcctgcgccgcggcgaagtggtcggcgcggtcagtattcagccgcaggcgctgcccagctgcctggtcgatcagctcggcgccctcgactacctgttcgtcgcctcgaaggagtttgcccagcgctatttccccaacggggtgacccgctcggcgctgctgaaagcgccggtggtggcattcgatcatctcgatgatatgcaccaggcctttttgcagcagaacttcgatttgccgccgggcagcgtgccctgccatatcgtgaactcctcggaagcctttgtgcagctggcccgtcagggaacaacctgctgtatgatcccgcatctgcaaattgagagagagctgaacagcggcgaactgattaacctcacgccgggcctgttccagcgccggatgctctactggcaccgttttgccccggaaagccgcatgatgcgccgggtgaccgatgcgctgatcgattacggccataaagtgttgagacaagattaacccccgcaagcaggccggccccgtccggcctgtatgacccaccttctcctgttcatatctttgaaatacatcacaaaataaaacatttcatgcggcaaaaaacgacgcatcgatggctattttttgctggcgacagaggcgatgaaaaagctcaccgtatttgcaatatcccatttcattgcgcatacggagcacaacatgtcagagttacgggagtggcaaacgctcgccaacaaagagctcagccggcgggaaaaaaccgtcgatgccctggtaaaacagacggcagagggcattgacgttaagccgctgtataccgaagccgatcttgataatctggaagtgaccggcaccctgcccggcctgccgcctttcgttcgcggcccgcgcgccaccatgtacaccgcacagccgtggaccatccgccagtacgccggtttctctaccgccaaagagtccaacgctttctatcgccgcaacctcgccgccgggcagaaagggctttccgtcgccttcgacctcgcgacccaccggggctatgactccgataacccgcgcgtggcgggcgacgtggggaaagccggcgtggcgatcgataccgtcgaagacatgaagattttattcgatcggatcccgctggataagatgtccgtatcgatgaccatgaacggcgcggtgctgccgataatggcgttttatatcgtcgcggcggaagaacaaggggttgcgccggaacagctcaccggcacgatccagaacgatattctgaaagagtacctgtgccggaatacctatatttacccgccaaagccctcaatgcgcattatcgccgacatcatcgcctggtgttcgggcaacatgccgcgctttaacaccatcagcatcagcggctaccacatgggcgaagccggagccaactgcgtgcagcaggtggcctttaccctggccgacggtatcgaatacatcaaggccgcgctctccgccgggctgaaaatcgatgacttcgccccgcgcctgtcgtttttcttcggcatcggtatggatctgtttatgaacgtcgccatgctgcgcgccgcacgctacctgtggagcgaagcggtaagcggcttcggcgccaccaatccgaaatccttagccctgcgcacccactgtcagacctccggctggagcctcaccgagcaggatccgtataacaacgtgatccgcaccactatcgaagcgctcggcgccacgctcggcggcacccagtcgctgcacaccaacgctttcgacgaggcgcttggcctgcccaccgacttttccgcccgtatcgcgcgtaatacgcagattatcatccaggaggagtcagagatctgccgcaccgtggatccgctggccggatcgtactacctcgaatcgctgaccgatcggatcgttaagcaggcgcgggccattatgcagcagatcgacgacgcgggcggaatggcaaaggcgatcgaggccggactgccgaaacggatgatcgaagaggcctccgcccgcgaacaatcgctgatcgaccagggcaagcgcgtcatcgtcggcgtcaataagtacaagctggaaaaagaagatgaaacggcggtactggagatcgacaacgtcaaggtgcgcaacgaacagatcgcctcgctggaaaaaattcgcgccagtcgggacgacgtgacggtaaaagccgcgctgaacgccctcacccacgccgcgcagcatggtgaaaacctgctggccgccgccatcaacgccgcccgcgtccgcgccacgctgggcgaaatttccgacgcgctggaggcggcgtttgaccgctacctggtacccagccagtgcgtcaccggcgtgattgcgcaaagctaccaccagtcagacaaagcagccggcgagttcgacgctattgttgcgcaaaccgaaaaattcttcgcggaacgcggccgccgcccgcgcattctgatcgccaaaatgggtcaggatggccacgatcgcggggccaaagtgatcgccagcgcctattccgatctcggcttcgacgttgacctgagcccgatgttttccacgccagaagagatcgcccgcctggcggtggaaaacgacgtgcacgtggtgggcgcctcatctctggcggcaggccacaaaaccctgatccccgagctggtcgatgccctgaaaaaatgggggcgggaagatatctgcgtcatcgccggcggcgtcatcccgccgcaggattacgccttcctgcaggcgcgcggcgtggccgccatttacggccccggtacgccgatgctggagagcgtacgcgacgtcctgatgaggattagccaatatcatgattaaccacgccacgctgacggacgccgtgcggcgactacgcctgggcgagcgggccacgctcgcccaggccatgacgctggtggagagccagcatccccgccaccaggcgctaagcgcacagctgctggatgccattatgcccttcgccggcaacgccctgcgcctcggcgtcaccggcacgccgggggccggaaaaagcacttttctggaagctttcggcatgctgctgattcgccacggcctgcgggtcgcggtgatagcggtcgatccgagcagcccggtcagcggcggcagcattcttggcgacaagacgcgcatgatcgaactggcgcgatcggactcggcatttatccgcccggtgccctccagcggccatctgggcggcaccagcctgcgcgcgcgggagctgatactgctgtgcgaagcggcgggctatgacgcggtaattgtcgaaaccgtcggcgtcggccagtcggaaacggaggtctcccggctggtggactgctttatctcgctgcagatcgccggcggcggtgacgatctgcagggcattaagaaggggattatggagatggcggatatcgtggttatcaataaagatgatggcgagaaccgcgccagcgtggcaatcacccgtcatatgtatgaatccgccctgcatattctgcgccgcaagcacgccgcgtggcagccgcgcgttttgagctgtagcgcgctggagcagcgcggcatcgaagccgtctggctcgcaattcttgacttcaaaaccaccctcaccgacagcggcgagctggaaaaactgcgccagcgccaggcgctggagtggctgcaaaagcaggccgaaaccgaggcgctgcacctgctgtttgcccgaaccgactttgcacgctacttccagcaaacgctacaggcggtgaaaaacaacggcctctcgccgcgcaccggcctgcggcagattagcgaattcctccagaatcattactttgcgtaaaaggatatttatgtcttatcaatatgttaatgtcgaaattatccgcaaggttgcggtgattgagttcaactatagccgcaagctcaatgccttaagcaaggtgtttatcgacgatctgatgcaggcgctgagcgacctcaaccggccggaaattcgctgcgtcattttacgcgcgcccgggggagcaaaggttttctccgccggccatgacatccacgaattgcccggcgggcgccgcgatccgctctcgtatgacgatcctctgcgtcagatcacccgtatgatccaaaagtatccgaaaccggtgatctccatggtcgaaggcagcgtctggggcggcgcgtttgagatgatcatgagctccgatctgatcatcgccgccagcacgtcaacgttctctatgacgccggtgaatctcggcgtgccctacaacctggtcggcatccacaatctgacccgcgacgccggctttcatatcgtgaaagagctgattttcaccgccctgccgattaccgcccagcgcgcgctggcggtcggtattctcaatcacgtggtggacgccgacgaactggaagattttaccttgcagatggcgcaccacatctccgagaaagcgccgctggcgatcgcggtcattaaggaagagctgcgcgtgcttggcgaagcccacaccatgaattccgatgagttcgaacgtattcagggaatgcgtcgcgccgtctacgacagcgtggattatcaggaaggcatgagcgcgtttatggaaaagcgtaaacctgagttcgtcggccattaatcacgccggattaaggagtataaaatgaaacggatgagcgccgatgaagcggcggagattatccagcacgaccagatggtggcgttcagcggattcacgcccgccggttcgcctaaagcgctgcccgcggccatcgctcgccgcgctgacgaattacatcgggcgcagaagccttttcagatccgcttgctgaccggcgcctccatcagcgccgccgccgatgatgcgctatcggcagccgatgccgtctcgtggcgcgcgccgtatcagactgcctccggactgcgacaaaaaatcaaccaggggcaggtgaagtttgtcgatctgcacctgagcgaagtggcgcaaatggtcaactatgggttctttggcgagattgatgtcgcggtgatcgaagcttcggctatcgcgccggacggacgggtctggctcaccagcggtatcggcaacgcgccaacctggctgctgcgggcgaagaaagtgatcattgagctgaatcactaccacagcccgcgggttgccgagctggccgatatcgtgatccccggcgccccgccgcggcgcaacagcatcgccatctttcatgcgatggatcgcgtgggcagccggtacgtgcaaatcgatccgaaaaagattgtcgctgtggtggagaccgagctgcccgacgccggaaacgttctggataacaataatccggtttgtcagaaaattgccgataacgtggtcacctttctgctggaagagatggctcgcggacgcatcccaccagaatttctgccgctgcaaagcggcgtgggcaatatcaacaatgcggtcatggcgcggctgggcgaaaatccggatatccccgcttttatgatgtactcggaagttttacaggagtcggtggttcatctgctggaaacggggaaaatcaccggcgtcagcgcctccagcctgacgatatccgccggttcgttgcgcaagatttacgacaatatggatttcttcgccagccgtattgtcctgcgcccgcaggagatctccaatcatccggaaattatccgccgtctgggggttatcgccctcaacgtggggctggagtttgatatctacggtcacgccaactcgacgcacgtagccggggtgaatctgatgaacggcatcggcggtagcggcgattttgaacgcaacgcctggctctctatctttatggcgccgtccatcgccaaggacgggaagatctccaccatcgtgccgatgtgcagccatgtcgatcacagcgagcacagcgtgaaggcgatcgttaccgagcagggtatcgccgatctgcgcgggctatcgccgctgcagcgcgcccgcgccatcattgataactgcgcgcatccgctctaccgggactatttacatcgctatctggagagcgctcccggcggacatattcaccacgacctcgcccacgccttcgacctgcatcgtaatctgcttgagcacggttcaatgctcggctagccctccgcgccgtcgcgatcttcagtaatatgctgaagcatcgtggcggtatagcgatgatttttcagcgaatagagatactcctgcatatacatcgcgctgccgggcgcgtcgaagtacttcagcttcgccggattcaccagacgccaggcgaagtaaggaataaccgtcaaaaactgcccgcgctctacggcgctaattttggccataaagctgtaggggcgatagataatcgtcgggttgatcccgctggggcgcatatacgcgtccagcatcgcctcaaaattggcccggttctggaaacgcatctgcagccagggcagctcacgtaacagatcctgcggcggcttatcttcataacggcgggaaaccagaaaccccagacgcagcggcgccagttcgctaatggtcaaattttccagctcctgcacgcggggcgaaacatgctgcggcgagataataaaatccagctggcgatcgaacaggttatcaatcacgccattctcgctgaactccacggcctgggtggttacgccatcgtatttatcgcccaggctgatgagctgatcgaaaataatcgttggataggtattgtcgatgccgataacgatgttgcgcgagcggtgcgcggaatagtgaatttcgttatcgatggccgataagcgctgataaatgggaaacagcttctgatagagctcctgccccgctttattgaggctgatgctgttatctttacgggtaaatagcgtatagccgatctgatcctccagcgcagcgatgcttttgccgaagggagacgcggtcatatgaattttttccgccgctctggcaatattattggtctgcgccaacagaatgaaattgcgcatctttttcgaaataaagatatccatgctcacctcatcgtagaacagggatatatccttaccttattcagggaaaagacttttgtcgcgctctcaattttacagatagtgacagaaaaaacccggcgcgaaggccgggcgacaggattactgtgcggctttgggttcttcagcgggtttcgccggttccgcagatgctggcgcaggctgggtcggctgcagctcaaacaccacgtccacctggtcatcaaactgaatggtcgcctgctcgtaggtttcctgagcagaaaccggcgccgcatcggctttcatcatccgcaccatcgggctcggctggtagttggagacatgatagcgaacgctgtagacgggccccagtttgccgtggaacccggtagccagctcctgagcctggtgaatggcatcatcaatcgccgctttacgcgctttatctttataagcgtccggctgcgccacgcccagtgaaaccgaacggatctcattcaggccggctttaagcgccccatctaacagaccgttgagcttatccagctggcgcagcgtcacttcaacgctacgcaccgcgcggtagcccttaagaatgcttttaccgttctgatagtcgtaatcaggctgggtacgcaggttagctgagttaatgtctttcttcgcaatgccgctcttctccaggaaggagagatactgggccacgcgctcatcggcctgttttttagcggatgccgcgtctttcgcggagacgtttacttcaatcgccagcgtagcgatatcaggaaccgcagcgacgctggcggtacctgaagtgacaatatgtgggccgtttggcaactcatttgcctgaaccgccattgcgctaaatccgagtgccgccgccagggccatgacttttaacttcactgtcgtttctccatcttacattggtcgtctatacgcagacgcatgcctgcaagggtcgtctatacgcagacgcatgcctgcaagcttagcgcgtacgcggagaaagtccatcggacaaggcttagttaagcagcgcctgaacatgagcgaagccgtccttcgccagctggaaggcaatgacccacatcaccagaccgaccagcacgttgataacgcgctgcgccttcgccgtacgcaggcgcggggcgagccaggcggccagcagggccagcccaaagaaccataagaatgaggcgctgatggtacctaaggcaaaccagcgcttcggctccatcgccagctgcccgccaaggctgccgagaaccacaaacgtatccagatacacgtgcggattcagccaggtgaccgccagcatggtgacgataattttccagcgcccctgcttcatcacttccgcgctggccagcgccagattgctgctcaaggccgttttcagcgcgccaaagccgtaccacaataaaaaagcgacgccgccccaggtcaccagcgccagcagccacggtgactgcatcagcagcgcgctgccgccaaaaatcccggcgcagatcagcagcagatcgctgatggcgcacagcagagcaatcatcaggtggtactgacggcgaatgccctgattcatcacaaaggcgttttgcggaccgagcggcaaaatcatggccgctcccagggcaagaccctgaaagtaatacgataacatcggaagtgatttccactgaaagagtcaatgccggggaatatagcgcgcggaaatcattagaggaaattgaaaattttaatcgttaataagaactactaatagggcgcagaaaaaaggccggacgaaccggcctgtataaaagaggagaattactctgctttttcctgcggacgaatgacgtgaacgtccatctgcggatacgggaagccgatgccgttggcgtcaaagtcgcgcttaatacgctccagaacgtcccagtatacgctttgcagatcgctgctcttactccatacgcgcaccacgtagttcaccgaagaagcgcccagttcattgagacgcacggtcatttcacgatctttgaggatacgttcatccgattcgatgatattggtgagcagctgcttcactttatcgatatcagcgtcgtaggccacgccgatgataaactcgttgcggcgcaccggctcgcgggagaagttgatgatattcccggcaatgattttaccgttcggcaccaccacgattttgccatccgcgctgcgcagggtcgtggagaaaatctgcacgttcagcacggttcccgcgataccgccaaggtcaacgtattcaccggcgcggaacgggcggaagaccaccagcaggacgccagcggcaaggttagacagcgagccctgcagcgccagaccgacggctaagcccgcggcgccgagcaccgcgatcaccgaggcggtttgcacgcccacgcggccgagagcggcgatcagggtaaaagcaataacggcgtagcgtaccagcgcagagagaaaatcggcaacggtggcatcaatatgccgcgcccgcatcaggcgattgacggtgttggaaacaatccgcgccacgatcaaaccgacaataataatcgcgatagccgcgacaatgttgacggtatagctcagcagtaatgcctgattgcgcaccagccatgaaccggcgttatttatgctatcgacaacgttcaaatcttccattcaactttccttatggatacccggacggggaaaaaataaccaaacctgataattacaaacaggttaagggtaaacaataagagtgcgttttgccaaattgatcacatttatttagcaacatttcatgttgttcagataataaaaaagcccgcatttctgcgggcttccgggtaagcaacaaacctttcttacagaacgtcgatcgcgttcagctctttaaatgcctgctccagacgggtcaccatggacgtctgtgcagcgcgcagccatacgcgcggatcgtagtatttcttgttcggctggtcttcgcctttcgggttgcccagctggccctgcaggtaagcttcgttagttttgtagtactgcaggataccgtcccaggttgcccattgggtatcggtatcgatgttcattttgatcacgccgtagcttacggagtctttgatttcctgagcggaagaaccggaaccaccgtggaatacgaagttcaggctgttgtgcggcaggttgtgtttcttagaaacgtattcctgagagtcgcgcaggatagtcggggtcagtaccacgttgcccggcttgtaaacgccgtgtacgttaccgaaggaagcggcgatggtgaaacgcgggctgattttgctcagctcggtgtacgcgtaatcaacgtcttccggctgggtgtacagagcagaagcgtccatgtggctgttgtccacgccgtcttcttcgccgccggtgcagcccagttcgatttccagagtcatgtccattttggccatacgcgccaggtacttagaacagatctcgatgttttcgtgcagggactcttcagacaggtcgatcatgtgagaagagaacagcggtttgccggttgcggcgaagtgtttttcacccgcgtcgagcagaccgtcgatccacggcagcagtttcttagcgcagtggtcagtgtgcaggataaccggaacaccgtagtgctcagccatctgatgcacgtgatgcgcgccagagatagcgcccaggatggctgcgccctgaggaacgtcagttttcacgcctttgcccgcgatgaacgcagcgccgccgttagagaactgaacgataaccggagaacgaacttttgcagctgcttccagaacggcgttgatggaatcagtacccacgcagtttaccgctggcagagcaaagttgttttctttagctacctggaacactttctgaacgtcgtcgccagtgatgacgcccggttttacgaaatcaaaaattttagacatgttacgtagtcctgtatctgtatcttcgaccgttgaagaaggttcgcgagcttttacgcgcgctgaaaaacaggcgggtctccccgcctgaactgaattactgcttagcgcgctcttcgagcatggctactgccggcagaactttaccttccacgaattcgaggaatgcgccgccgccggtggagatgtaggagattttgtcagcaataccgaacaggtcgattgctgccagggtgtcgccgccgcctgcgatggagaacgcttcgctgtctgcgatggcgttagccacgatttcagtacctttgcggaagttcgggaattcgaacacgccgaccgggccgttccacaggatggttttcgcgtttttcaggatttcagccagtttctctgcggaagcatcgcccaggtccagaatctgctcttcatctttgatgtcgttaacagatttcagggtagcggttgcggtttcagagaactcggttgccacgcgaacgtcagtcggaaccgggatatcgcaggtcgtcagcaggcgtttcgcttcgtcaaccagatcggcttcgtacagggacttaccgacgttgtggccctgagcggcaacgaaggtgttggcaatgccgccgccgacgatcagctggtcagcgattttagacagggagtccagaacggtcagtttggtagaaactttagaaccacccacgatagcaaccatcggacgagccggttctttcagcgctttacccagggcgtccagctcagcggccagcagcggacctgcgcaagcgacgtcagcgaatttgccgataccatgagtagaagcctgcgcgcggtgagcggtaccgaacgcatccataacaaagacatcgcacagcgcagcgtattttttcgccagcgcttcgtcatctttcttctcgcctttgttaaagcgaacgttttccagaaccaccagctcaccggcagcgacttcaacgccgtccaggtaatctttaaccagacgtaccgggttagacagtttgtctttcagatagttaacaaccggcagcagagagaattcttcgttgtactcgccttcggtaggacgacccaggtgggaagtgaccatcactttcgcaccctgtttcagggccagttcgatggtcggcagagaagcacggatacgcgcgtcgctggttactttcccttctttaaccggtacgttcagatccgcacggataaaaacgcgtttaccagccagatccagatcggtcatcttaattacagacatggtgaatcctctcgttgattcttgataaagttttgcaggcgcctgagcgccttacctgaaaccttgtgcggccatcgctaacgtggtgtcgagcatccggttagcaaagccccattcgttatcgcaccagaccagcgttttgatcaaatgcgcgccacttacccgcgtttgtgtgccatcgacaatggcgctatggggatcgtggttgaaatctatcgagactaacggcaattccgtatagtcaactataccatgaaatgcacccagtgctgctttttgcagcaactggttgacttcacttgcttttaccggttttttcaccgttacgctaaggtcgatcgccgtcacattaatcgtcggtacacgaaccgcgatcgcttcaaagcgatcgttaaactgagggaaaaaacgcgtgatccccgcagcaagcttagtatcaaccgggatgattgattggctggccgctcgcgtcctgcgtaaatccggatgccaggaatcaatgacctgctgatcgttcattgatgagtggatcgtggttaccgttcctgactcaatgccataggcatcatctaacagcttaatgaccggaataatgcagttggtggtgcaggaggcgttggagacgatacggtgctcggttctgagctcagcatgatttacgccaaaaacgatcgtcgcgtcgaggtcgttgccgccagggtgtgaaaaaagcacttttctggcgccggcctgaagatgggcttcgccatgctcgcggctgccgtaaacgccggtacagtcaagcaccacatcaaccgccagttcccgccagggcaacgcctcaagggaagattcatgcaaaagacgaatggcatcgtcgccaacaaacagctgctctctctcctgacgtacatcccaggcaaagcgcccatggctggtgtcatatttcaataaatgcgcgatgccggcagcatccgccagttcattgattgccaccacggtaatttccgcacgacgcccggattcatacaaagcacgaaccacgttacgcccgatgcgaccgaagccattaatcgcaatgcgtatggtcataggtctcctgcaaggctatccatgatatgaggtggctgacagagtaatgcagcaacgctctaagggaaaccttacctgtcgcaaactgcgactgattgattaattgtcgaacatttagacgactgaaacgcttcagctagaataagccaaacaaggaataaaaggaatgattgtccagccggagaaaccatttatctgacttacatcacacttttaccctctctgccgcggaatttattccctattccacaatgacgaataagcgtagcaaaatcttttcgttgccgggcggcaaacactgatttatatcagaaactataccgtttagcggcgatatgatgaccgttacgtccgagtctcggagtccctcgaaaaaatgacaatcccccacttgcagccctctgcggctcgttactatgcgcttcgcttacttccgggcgaggaggttttttcacgcctgcgcgccttcatacaagagcaacagattcaggctgcctggatagccggctgtaccggcagcttaagcgatgcggcattacgttttgccggccaggatgagaccacttttttgaccggaacctatgaggttatctccctgaacggcacgctggaatggcaaggtgaacatctccatttagcgatatccgatccgcaaggcgccatgctcggtggccatatgatgcccggctgtaccgtccgcaccacccttgagctggtgataggcgaactgacctccctggcgtttagccgtcagccgtgcgcggtttccggctatgacgaactggtcatttcatcccgataacttttccccttaaagaggtttatatggctcgtcgccaatttaccagccagtccctggtgctgattgcgatcgccgtcgccatcaatatgatcggcggacagctcatcagtctgttaaagcttcccatctttctcgattcgatcggcaccttaatcagcgcggttttactcggcccggtcattggcatgttgaccgggttactgaccaacctcctgtgggggctgctgaccgatccgattgccgccgcctttgcgccggtggcgatggtgattggtctggtcgccggatggctggcgcgcgcgggatggttccgcaccttaccgaaggtggtcattagcggcgttgtcattaccctcgccgtgaccgcggtcgccgtaccgctgcgtacggcgctgttcggcggcgtgacgggcagcggcgcggatctgtttgtcgcctggatccattcggcaggtcagaatctgctggaatcggtggcgattaccgtcttaggcgctaatctggtggataaaatccttaccgcgattatcgtctggatcctgctgcgccagctgccgctgcgcacgctgcgtcagtttcctgcgatgtctgccgtacgctaatgcacccttttacgtcattaaccctctgggcgctggcggcggcgactacgctgctgctacccgcagagacggcgctgccggtgtatagcgctgcggcgtttctcagcttgctgctgttcagggcgacgcggcggcgggcaaaatacgtcgcctggctcctcttctcgctgggcattggcctgtggctggtccacggcggctggtttacccagtggctgagcggccacccccgcgacccgcagcgctgggccagcgccatcacgctgtggctgagaattctggcgattgtttcaacgtcacagctgtggatggagtacgtaccggtacagcgctttattcgcgccctgtttgcttcacgcctgccgccgggcgtcgcttatctgttcgctggcccactgctggttgtcgaacagctaaagcgccagctgacgattatccacgaagcccaacgcgcccgcggcgtaccgctggacgagaacggctatcagcggctgcgcgctatgcctgcgctcattatccctctgacccacaacgcgcttaacgatctggcgatacgcggagcggcgctggatatgcgggcatttcgtttacatcgtcggcgcaccacgctttgggcgccgaaagacagcgccttacaacgtctggcgcgttacggcatgctgctggcgatggtcgctgaagctggagcctggctatggttacgttagaacaattccgctaccacccgacccaggcggcgcgatctgcggcatgctttgatttccattattcgcagcccggcatggtggcgatttttggcgatagcggcagcgggaaaagcactctggcgcagattatggcgggctggtatccggattttctgcccggcgatatcgaaggtaaaggcaccctgcttggtatccccatcggccagcaatcgctggtcgaacgggcgcaggccatccagctggtccagcaatcaccctatctccagctttccggctgtaccttcagcgtcgaagaagaggtcgcttttggccctgaaaatctctgcctcagcgaagaggagattatgcgccgtattgacgaagcgctgacgctgacggcgtgccaggcgttacgacatcgccacccctccacgctatccgggggagaaacccagcgcgtggcgatcgcctgcgcgctggctatgcggccaacgctactgatccttgacgaagcctttagccgcctgacggcgcaggcaagcgctatgcttctggagcgcctggggcactgggcgctggcgcagcgttcgttgattatcctttttgaacgccccccttcgccttttcttgcctggtgtcagcagggatggcgactgcacgatggagcgctttccccgctatgctaacgttgaatcaggtgacctggcgctggcccggcgcgacggctgactgtctgcaaaatatctcgctggcgctcggccagggggaatggctggcgctcaccggcgataatggcgcggggaaatccaccctgctgcgggtgatggccggactgctacccgccacgtccggtagcgtcaatttgctggataagccgattgcgcaatacaaaaaccgtcaacgcgccaatatcatcggcgtgctgtttcaggaggccgaaaaccagctcttccacagcaaagtcgcggaagaggtcgcctttgggctgcggctccagaaattgccttctgcggaggttgcgcaacgcaccgcggcggcgctgaaattatgccggctggagagcgtagccgacgcgcatccgctggatttacataccgcccaacgcaggatggtcgccgtcgcctctctggaagccatggcgccagaaatactgctgcttgacgaacccagccgcgattttgaccagcactggctggcaatatttgaagcgtggctggcggtttgccgcaaaagagggaccagcgtagtggccatcagccacgatgaggcgtttacacggcggcacttttcccgccgggtgcttctggaaaaaggtagggtgctgaggatggtctgaaaaagaaacgggccgccagagcgacccgttttttacggcggcagccagagtttttacccggaggcggtgctgcgcacctgtccgggctacccgaccgcgctggcccgtagcccggaggcggtaaaagaactacagcagcgctttcgctttcgcgaccacgttgtccacggtgaagccaaactcttcaaacagctgctccgccggcgcagactcaccgaaggtggtcatgccaacgatcgcgccattcaggcccacgtatttgaaccagtagtcggcgatacccgcttcgatggccacgcgcgcagagacggctttcggcagcacggcttcacggtaagcggcatcctgcttgtcgaacgcgtcggtggacggcatggaaaccacgcgcgccttcacgccttcggcagtcagtttttcgtaagcgccaaccgccagctccacttcagaaccggtggcgatgaagatcagctccggctgtcccgcgcagtctttcagcacgtagccgccgcgggcgacgttcgccagctgctcttcggtacgctcctgctgcgccaggttctgacgggagaggatcagcgcggtcgggccgtcctgacgctccacgccgtatttccacgcaatggcggattccacctggtcgcacggacgccatgtggacatgttcggagtgacgcgcagggaagccacctgctcaaccggctggtgcgtcgggccgtcttcgcccagaccgatggagtcgtgagtgtagaccatcacctgacgctgcttcatcagcgccgccatacgtaccgcgttacgcgcgtactcgacgaacatcaggaaggtggaggtgtacggcaggaaaccgccgtgcagggcgataccgttggcaatcgcggtcataccgaattcacgcacgccgtagtggatatagttaccggcagcgtcttcgttgatggccttagagccggaccacagggtcaggttacttggcgccaggtcagcggagccgccgaggaactcaggcagcagcgggccgaaggcttcaatggcgttctgcgacgctttacggctggcgattttcgccgggttagcctgcagcttcgcgatgaattcgttcgctttcgcgtcgaaatcagccggcatctcgcctttcatacggcgggtaaactcggcggcttcctgcgggaaggctttggcgtaggcagcgaatttctcgttccacgcggactctttcgcctggccggcttctttggcatcccactgggcatagatttcagacgggatttcaaacgccgggtgtttccagccgagcgcttcgcgggtcagcgcgatttccgcgtcgcccagcggcgcgccgtgggagtcgtgggtaccggctttgttcggcgaaccgaaaccgatgatggttttgcacatcagcagggacggtttgtcggtaaccgcacgcgcttcttctaccgcgcgtttaatcgagtcagcatcgtgaccgtcaacgccgcgcaccacgtgccagccgtaggcttcaaaacgcttcgcggtgtcatcggtgaaccagccttccacgtgaccgtcgatagagatgccgttgtcgtcatagaacgccaccagcttgcccagtttcagggtaccggccagggagcatacctcgtgagagataccttccatcatgcagccgtcgcccatgaacgcgtaggtgaagtggtcaacaatgtcgtggcccgggcggttgaactgcgccgccagagttttctccgcgatggccataccaaccgcattcgcaataccctgccccagcggaccggtggtggtttccacgcccgcggtgtagccgacttccgggtgacccggcgttttagagtgcagctgacggaagttcttcagctcttcaatcggcagatcataaccggtgaggtgcagcaggctgtaaatcagcatggaaccgtggccgttggacaggacaaaacggtcgcggtcggcccatgacgggttctgcgggttatgattcaggaaatcacgccacaggacttcggcaatgtcagccatacccatcggggcacccgggtgaccggatttggctttctgtactgcgtccatgctcagcgcacgaatagcgttagcaagctctttacgtgaggacattttgactccagatcggataatgaaggccatgcccgcaacgacttgacgacagcgcgttttgggctacgccggaaaaaagtgtgaacaatgtaacctaagcggcaaagcatgtacatggagcatccttttgccgtttaagaaatctctggaacacgttgtgctacggcgtaatcctctcgcccgcattctcatatagtatttataatttgcacaggatacggcaggcagccatcgccgttttttcggataaataaccataagattgtggaagataaaaaatgaaaattcgctcagctcttcttgcccttgggatcgcagccacgcttaccggatgccagaacatggattccaacggcctgcttagctccggcgcggaggctttccaggcttattcactcagcgacgagcaggtgaaagccttaagcgacaaagcctgtcaggagatggatgcgaaagcgactatcgcgcctgccagcagtgaatacagcaaacgcctgagtaaaatcgccgccgcgctgggggacaacatcaacggccagccggtgaactacaaggtgtatcaaactaaagacgttaacgccttcgccatggctaacggctgcatccgcgtttacagcggactgatggatttgatgaatgataatgaagtcgaagcggttatcggccacgaaatgggtcacgtcgcgctgggccacgtgaagaaagggatgcaggtagcgctgggcaccaacgcggtacgcgcggcggcggcctccgcgggcggcatcgtcggcagcctgtcgcagtcgcagctgggcgatctgggcgagaagctggtgaactcgcagttctcccagcgtcaggaatcggaagcggacgactactcgtacgatctgctgcgcaagcgcggcattaatccggcaggacttgccaccagcttcgagaaactggcgcagctggaagccggacgccaaagctccatgtttgatgaccacccggcatcggaagcccgcgctcagcatatccgcgatcgcatgaaggccgacgggattaagtaagccccggctccccaagtggcataacaaacagaattgggggagcttatcggtatgccgggtagcggctcacaccttacccggcaacacaacctgcacttattcttaggccggtgcaagcactgcgcctccaggtcgttcgaggaaaacgcacgctgtgagcgacctgattattcgccttttttcgccgcctgaatgtagagcatttccagcgccagcgtcgccgccgccagggcggtgatttcggactggtcgtaggccggagcgacttccaccacgtccatgccgacgatgttcagatccttcaggccgcgcaccagcttgatcgcacgatcggaagtcaggccgccgatcaccggcgtaccggtacccggggcaaacgccggatccaggcagtcgatatcaaaggtcaggtacaccggcatatcgccgacgatctgtttcacctgcgcaatcacatcgtcaacgctgcgatcgttaacctggcccgcatccagcaccgtgaagccgttgtctttatcaaactcggtacggataccgatctgcaccgaatgattcggatcgatcaggccttcgttgggcgcggtgtagaacatggtgccgtggtcaaattcgcagccattggcgtaggtatcggtatgggcgtcgaaatgcaccagcgccattttgccaaagtgcttcgcgtgagcgcgcagcagcggcagcgtcacaaagtggtcgccgccaaaagagagcatgcgttttcctgccgccagcagtttttccgcgtgggcctgcagcttttcactcatttcacgcgcgtcgccgaaggcgtaaaccagatcgccgcagtccacgacgttcaggcgctcgcgcatgtcaaaattccacgggaagcggttgtgctcccacgcaaggttcgtcgacacctggcggatcgccgccgggccatgacggccgcccgcgcgtccggaggtcgccatatcaaacggtacgccggtgatgacccagtccgcatcgctgtcgtacggcatgaaattcatcggtagacgcagaaaaccaaatgcgttggataccaaggagttatcgtattgatgacctaaggtgctcatgggtatgacctcttttacagtcgttgtattgaaatacaaatataaaaaaacccttccgcgtcgttaggcccgacgaggaagggtttgaatgagtttactgcttagttgggcgaattatcgccgtaaatgtctacgcgttcaagtgagtctggcaagtggtgaaccaggcctctctctccctcttccctctccgctacggagagggcatagatcactcgtcttccagataagtgtagccgtataaaccggcctcgaactcttcaaggaactgctgctgcaggtcagcgtcgagatcggtctttttcacctgatcgcggaactgggtcaacagcgtgttcggatcgagctgcacgtactgcagcatatccgcgacggtatccccttcatcagacagctccacttcgacgctgccgtcagggaagacaaacacgtcgacggcttccgtatcgccgaacaggttgtgcatattgccgaggatctcctgataggcgcctaccataaagaagcccagcatcggcgggttatccggatcgtattccggcatcggcatggtggtcgcaataccgtcgccatccacatagtggtcaatcgcgccgtcggagtcgcaggtgatatccagcagcaccgcgcggcgttccggcaccatattcagcccttccagcggcatcaccgggaatagctgatcgataccccaggcgtccggcatcgactggaacagggagaagttgacgtagatcttatccgccatacgctcctgcagttcgtcgataatcgggcgatgcgcgcggttgctgggatcgagctgtttctgcacttcatggcacatattgagatacagctgctcggcccaggcgcgctcctgaagattaaaggtgccggaggagtagccgatatgaatatcgtgcagatccatctggctgtcgtgcagccattcgcgcagcgagcggcgattgccggtttcctgcatctcctgccaggtttcccacatgctttgcagcggacgcgcggcgtcttccgcgggcggggtcgcctcggtatattcgttacgctcaacgccgataatattcgataccagcacggtgtggtgcgccgtgaccgcgcggccggattcggtgatcaccgtcgggtgcggcaggccgttctcttcacaggcatcgccaatcgcccagatgatgttgttggcgtattcgttcaggccatagttcaccgagcagtcggactgcgaacgggtcccttcatagtcgacgccgagaccgccgccaacgtcgaagcactgaatattcacgcccagcttgtgcagctcaacgtagaaacgcgacgattcacgcacgccggtggcgatatcgcgaatattggccatctgcgagccaaggtggaagtgcagcagctgcaggctgtccagatgcccggctgagcgcagaatttcaaccagctgcagaacctgggtcgccgcgaggccaaatttggacttttcgccgccggaggactgccacttaccggagccctgcgaagccagacgcgcgcgcacgccgagacgcggcaccacgttcagccgctcggcctcttccagcacgatggcgatttcggacattttctcgatgaccagatagaccttgtggcccatcttttcgcccaccagcgccaggcggatatattcacggtctttataaccgttacagacaatcacgctgcgggtcataccggcgtgcgccagtaccgccatcagctcggccttggagccggcttccaggcccagcggctcgccggagtggatcagcgattcaatcacgcgacgatgctggttaaccttgatcggataaaccaggaagtagtcaccgttatagccataagattcgcgcgcgcgtttaaaggcggcgttaatcgaacgcaggcggtgctgcaaaatctgcgggaagcagaacagcgcaggcaggcgctgcccctgagcttcacgcgctttcaccagctcggcaaggtcaacgcgcgcttccgggacgtcaggatccgggcagacgctaatatggcccagttcgttaacgtcgtagtagttattaccccaccaggcaatattgtaagtacgtagcatcttgctggcttcctgggagctcatcgcaacctcctgcatggaacgtagtacaccgtgatcgcctgctgacgaaggcgaagataaggacatgtcgtcagacatagcgaacctcaaatttagtaacaagtgtaaaacagttgactactatcgcaatccgaagaagcgataacaacccataaacagtccgaaatcccagtagatagtgctggtcttgcggctgagcgaccggtttcttattcatatcatcgtaaaacacgtacccgaacggagtatgacagtccggagaaaccacgagaaaacccttgctatcgcaagagcgcccttgttcagttttccagcagcctgccggcccgggaatcctgagaagcgccgagatgggtagaacatcggctggtttgcatgagagagatgcggattgaggagtagtgacgcgcgacggaacgacgcgacgaatcaggcgaaaaacgtgggttcattatctggtatcacctccacactgccccgagtcgggccagcgacaagccaaagctataggttccggacagccagcgaaaacgccgctgcgggactctgtcaatagagactgcttaacccggctggaagtggcgtcacgaggtgagtgctcgtacgctgttttaatgagccgcgcgcggcgttttataccgagaagcggggtaaaaagcaaaataaaaatatgcgcgttgccgggtattgtcaggaaaaattgccaccgccctttttctataaatgcgacgaatatcaaaaaaggctggaaatggggtcaagaactgccctaaaatagccgtccagaagttaatccatctatactgattaacactcagactgctcgtgtcactacctgcaagctttggtagagtcatccgtcaaagccattctacacaacagtatgagctacccgaatcgtccacaggtgaaataaaacatggcaaaacacctctttacgtcagagtccgtatcagaagggcatcccgacaaaattgctgaccaaatctccgacgccgtgctggatgcgatcctcgaacaggatccgaaagcgcgcgtagcatgtgaaacctacgtcaaaaccggtatggttctggtcggtggtgaaatcaccaccagcgcatgggttgatatcgaagagatcacccgcaacacggtccgtgaaattggctacgtgcattccgatatgggctttgacgccaactcctgcgcggtgctgagcgccatcggtaaacagtctccggacatcaaccagggcgttgaccgcgccgatccgctggaacagggcgcgggcgaccagggcctgatgtttggctacgccactaacgaaaccgacgtgctgatgcctgcgccgatcacctatgcgcaccgtctggtgcagcgtcaggctgaagtgcgtaaaaacggcaccctgccgtggctgcgcccggatgcgaaaagccaggtcaccttccagtacgacgacggcaaagttgttggtattgatgcggtcgttctctccacacagcacgccgaaagcatcgatcagaaatcgctgcaggaagcggtgatggaagagatcatcaaaccggttctgccgaccgagtggctgaacagcgcgaccaaattctttatcaacccaaccggccgttttgttatcggcggccccatgggcgactgcggcctgaccgggcgtaaaatcatcgttgatacctacggcggcatggctcgtcacggcggcggcgcgttttccggtaaagatccgtctaaagtggaccgttctgcggcctacgcggcgcgctatgtggcgaaaaacatcgttgccgccggcctggccgatcgttgcgaaatccaggtttcctacgccatcggcgtggcggagccaacttcaatcatggttgaaaccttcggtaccgaaaaagtgccttctgagcagctgaccctgctggtgcgcgagttctttgatctgcgtccgtatggcctgattcagatgctggatctgctgcacccgatctacaaagagacggcggcatacggccactttggccgcgagcatttcccgtgggaaaaaaccgacaaagcggcccagctgcgcgaagcgtccggtctgaaataagacgccgctctcctcactttcaaggccagccccgcgctggcctttttattttacgcccctcagccgcccggcataccgcctgcaacatccctattatggaagcgattacatcatatgcagagcaaaccttttccgttattgcatgcaaaatgtaataagacttcactttgttacacaatatttcagtaaagtccgattagcgcttttaatttcttgagctaaacttaattaatatactgatttaaatgcgtttatagtcattacgtttctttactctagtgtaaccgattacacagccgtgattactatcacatttttttacgacgtatttacctaccctacgcatcgacaagatcaataactcaaccggagggcgttatgcctgacaacaaaaaacaagggcgttccaacaagacgatgacgttctttgtctgtttcctcgccgcactggctggcctgctgttcggccttgatatcggtgttattgcgggtgccttaccctttattgccaacgagttccagataagcgcccacactcaggagtgggtggtcagctccatgatgttcggcgccgccgtcggcgcggtgggcagcggctggctctccttcaaactcgggcgtaaaaaaagcctgatgattggcgccatcctgttcgttgccggctcgctgttctccgccgccgcaccgaacgtggaagtgctgctgctctcccgcgtgctgctcggcctggccgtaggcgtcgcctcctacaccgccccgctgtatctgtctgaaatcgccccggaaaaaatccgcggcagcatgatttcgatgtatcagctgatgattaccattggtattctcggcgcctatctttccgatacggcattcagctacagcggcgcctggcgctggatgctcggggtgattattatcccagcggtgctgttgctgattggcgtggttttcctgcctgacagcccgcgctggtttgccgctaagcgccgctttgtcgacgccgaacgcgtcctgctgcgcctgcgcgacaccagcgctgaagcgaaacgcgagctggatgagatccgcgaaagcctgaaggtaaaacagtccggctggtcgctgtttaaagaaaacagcaacttccgccgtgcggtattcctcggcgtcctgctgcaggtgatgcaacagttcaccggtatgaacgtcatcatgtactacgcgccgaagatttttgaactggcgggctataccaacaccaccgaacagatgtggggaaccgtcatcgtgggtctgaccaacgttctggcgacctttatcgccatcggactggttgaccgctggggccgtaagccgacgctgatcctcggctttatcgttatggcgctcggcatgggcgtgctgggcagcatgatgcatatcggcatccactccgccacggcgcagtactttgccgtcctgatgctgctgatgtttatcgttggctttgcgatgagcgccggcccgctgatttgggtgctgtgctccgaaatccagccgctgaaagggcgtgatttcggtatcacctgctcaacggccaccaactggattgccaacatgatcgtcggcgcgaccttcctgaccatgctgaactcgctgggcagcgccaacaccttctgggtctatggcggcctgaacatcctgttcatcttcctgaccctgtggctaatcccggaaaccaaaaacgtttcgctggaacatatcgaacgtaacctgatgaaaggccgtaagctgcgcgaaatcggcgcgcgcgactagactaacccgcttcctccctcccgggaggaagcttcttcttgctctcctcatcccgccgcactattctctggcgctatgaaaacaccccgaattcccattgcccttcaacaggccgttatgcgcagcctgcgggaaaatcttgccaaagcgaacctcaagctgggacgaagctaccctgaaccggtgctggtttatcagcagcggggaacctccgccggtaccgcctggctggagaaaaacgaaatccgccttaacccggtgctgctgctggaaaaccagcaggcgtttattgatgaagtcgtgccgcacgagctggcccacctgctggtatggaagcactttggccgcgtggcgccgcacggcaaagagtggaaatggatgatggaaagcgtgctgggcgttccggctctgcgcacccatcgtttcgaactcgattcagtgcgtaaaaataccttcccctaccgctgccagtgccagcagcaccagcttaccgtccgccgccataatcgcgtgatgcgcggggaggccacctatcgctgcgtgcgctgcggagatgttctggtggcggaaaagtaatctccggaaataactggaaattttctgatctgactgattgcgtctggcaatcacattcgatacgttgcgggctcgttttgacacggagttaacgatgtcccgtattcatatttttgctgccgcgtttctcagcgcggcggtatgcgccccgcttgcagcggaaggaatcaacagtttttctcaggccaagaccgctggggtcaaggtcaatgccgacgcccccggcgatttctactgcggctgtaaaatcaactggcagggaaaaaagggggttatcgacctggaatcttgtggctataaagtgcgtaaaaatgaaaatcgcgccagccgggtcgagtgggagcatgtggttcccgcgtggcagtttggccatcagcgtcagtgctggcaggacggcgggcgcaaaaactgcgctaaagatccggaataccgcaagatggaaagcgacatgcataacctgcagccagcggtcggcgaggtcaacggcgaccgcgccaactttatgtacagccagtggaacggcggcgaaggccagtacggccagtgcgcgatgaaggttgattttaaagataaagttgccgagccgccggctcgcgcccggggcgctatcgccagaacctacttctatatgcgcgaccgctaccagctcaatctttcccgccagcaaacccagctgtttaccgcctgggataagctgtatccggtaacaacctgggagtgcgaacgcgacgcgcgtattgccaaagttcagggcaaccataatccttacgtcctgcaggcttgccaggcgcaaaagagctaacctacactagcggcaattgttaatttgcagcttcactccttcccttgccatgggggaggagaatatctgcgcaaagaacggaatatcaagcatgcgcattcctcgcatccatcacccggaaccgattaccacgggtagccagatagccctttccgacgacgcggccaaccacgtcggtcgcgttttacgcatgggtaaaggccagacaattgagctttttgacggcagcaatcaggtcttcgaggcggtcattgtcgaggcaggtaagaaaaacgttctggttgacgttcagagcagcaaaatggataaccgtgaatccccgctgcatatccatttaggccaggtgatgtcccgcggcgaaaaaatggaattcaccatccagaaatcgatcgaacttggcgtaagcctcataacgccactgttttccgagcgctgtggcgttaaactggacgccgaacgtttgcagaagaagatccagcagtggcaaaaaatcgccattgccgcctgcgagcaaagcggccgcaacgtggtgccggagatccgccccgccatgcagcttgaagcctggtgcgcggagcaggacgagggtctgaagcttaatttgcaccctcgcgccaacgccagcattaatacgctgccgctgccggtcgaacgtatccggctgctgattggcccggaaggcgggctttcggcagaagagatagcgatgaccgctcgctaccggtttactgatatcctgttgggaccgcgcgttctgcgtacagagacaactgcgctcactgccattaccgccctgcaggtgcgttttggcgacttaggttgaagcgttaacggagaagaacaatgattaagctcggcatcgtgatggaccccatcgcaaccatcaacatcaagaaagacaccagcttcgccatgttgctggaggcgcagcgtcgcggctatgaactccattatatggagatgaacgatctgtacttaatcaacggcgaagcccgcgcccgtacgcgtaagctgagcgtcgagcagaactacgataaatggtacgcgttcaacggcgaacaggatctgcctctggcggaccttgacgtcattctgatgcgtaaagatccgccgttcgataccgagtttatctacgcgacctacatcctcgaacgcgccgaagagcaaggcacgctgatcgtcaataagccgcagagcctgcgcgactgtaacgaaaagctgtttaccgcctggttctccgagctgaccccggaaacgctggtcacccgtaataaagcccagctgaaagccttctgggaaaaacatggcgatgtcattctcaaaccgctggacggtatgggcggcacctccattttccgcgttaaagagggtgaccccaacctcggcgtgattaccgaaacgctaaccgagctgggcagccgctactgcatggcgcagaactatctgccggccattaaagatggcgataagcgagtgctggtggttgacggcgagccggttccttactgcctggcccgtatcccgcagggcggcgaaacccgcggtaaccttgcggccggtggtcgtggcgaagcgcgcccgctgaccgaaagcgactgggccatcgcccgccgcgtgggcccgacgctgaaggccaaaggcttaatcttcgtcggtctggatatcatcggcgatcgcctgacggagattaacgtcaccagccccacctgcgtacgtgaaatcgaagccgccttcccgatttccattaccgggatgctgatggatgccatcgagaagcgcctcaataaataaagcgcttattcaggctgcaggccagcgcctgtagcctggagcctgctcaggagattcacgctcaggttcataccggcaacgcgccttgagcctgcaagataaagtgaatcgacactcccttgctttacccgcatactgggtgctgcttttttgaaccaggaacagaacctctgacaatgaatttacagcatcactttctaattgccatgcctgctctccaggacccgatgttccgtcgctccgtagtctatatctgcgagtataacgatgacggtgccatgggcatcatcatcaataagccgatggaaaatctgcaggttgaagggatcctggagaagttaaaaatcacgcctgaaccgcgcaatcccgagattcgcctggataaaccggtgatggttggcggcccgctggccgaggatcggggttttatacttcattcgccgccttccgacttttcttccagcattcgtatttccgataacacggtgatcaccacctcccgcgacgtgctcgaaacgctgggtacggataaacagccggacaacgtgctggttgcgctgggctatgcctcctgggagaaaggccagctggagcaagagattctggataacgcctggctcaccgcgccggccgatcggaatattttgttcagcacgccgatagctgaccgctggcgcgatgctgcgaagctcattggcatcgatatcgtgacgatgccagccgaagcggggcatgcgtaatgagcggcacttttttaggctttgattttggcaccaaaagcattggcgtcgccgtagggcagcgcatcacaggcactgcccgcccccttcccgcgttgaaagcgcaggacggtaagcccgactggaatattatcgaaaagctgctgaaagagtggcagcccgaagccgtgattgtcggcctgccgctgaatatggacggcacggaacagcccctcaccgcgcgcgcgcgcaacttcgcgaataaaatacacggccgattcggcgtgcaaataaccctgcatgatgaacgtctgagcacggttgaagccagagccgggctattcgaacacggtggattccgggcgctcaataaaggcagcgtggattccgcttctgcagtcattattctggaaagctacttcgagcaaagtttctgaacatcaacgatggcgccctaccgcagcggcaggcgccatcatcctgatttcatttttagtggcgcaaatgctcattcgcccagctgaccgcctgagtccggttcttcacgcttagcttacggaacacgttgtacagatgggtacgcaccgtgttttcactgataaacagcgcgcgggcaatatccagattggtcgccccgcagcgaagttcattcaggatttcacattcacgctcggtcagcggtgaattttccgcaggcgccgatacatgatccgcagcatacatcgccgggtgcatcacgctcaattcagccgtctgttcgccgttcagcacagccttaacgccctcaattaagcgcgattcatcatcgtcatgacggaaaacgccgtacagcgctggccactgcgccatttcgtagagctcatacttttgcgcgctattgataatcaataaacgggggttatccgcctgtaaacgaataatgtcacgccatacgctattcaactttttatttgaaactgcaatatcaaataatattacagaatctttcaaaagacgctgcgcgaggggtttgttaatattttgcagaacgactgacgcagataacttctcagccagccaggttgcgaatgctttgctttgaatagaggggtgagtaataaaagtaacctggtgagaaaaagccgaattctcagataaattaatcacttaaaactctccttagttgattcccgccttcatagcggttaaatgaattaacaagaatacgatcgctggtgtatttataaaatcaaaccaaacttacaccttgaaacattattccatgggaattttcctatccctgtaaacagcataaatcgaatgccttaagagagtcaaaagattatcaaacttttttcctggttatgggaggtttatgtcaattcgtttttcatagcgtgcattattcggcttaattttaggtacttatttgtaatataaaataatgataccaaacattaataaaacattatcataacaagccattggtatgatgtctgaatataaaagatgcagctataaaagacccgcagccgtacgttgctgaaagctttgcgtaaaagtttgcatcccgaattgctgcccggtttgcatcacgccgggcagctgatgcgttttcccctcgcggatcaaattcgccaccgccggggtattaaccaaaagctcgtatagcgcaactcttccgccagcagtatccggaaacaatttttgtgccagcaccgcgcataaacttcccgccagctggctacgaacctgctctttctcctgagcgggaaaaacatccaccagcctttcaaccgcctgtgccgcaccgcgcgtatgcagcgtcgccataaccagatgtccggtctccgccgcggtcaatgccaggcggatcgtttcgctgtcacgcagttcccctagcagaatgacatccggatcctgacgcagcgcagcgcgcagggccgcggcaaatgaggggcagtggcgaccgatttcccgctgctggatcaggcagcgctcgctgtgatgaataaactcaaccggatcttccagcgtcaggatatggccattgaggcgctgattaagatagcccaccatcgccgccagggtggtggatttcccgctaccggtggcgcccgtgaccaggataagcccgctctcctcattgagcagctccgttaaggcggccggcgcgccgagatccgccagctgcgggcaggtttctgccagcagacgcagggccagcgacaggccgcggttgtggacaaatgcgctggcgcgcaggcgcgggccgccggccggagccagcgcgaaatcaacctgcccgcaggcctgccactgggcgagctgctcggcgttgagccaatcagcgagtatcttgccaatatccggagaggtaaaaggcgcaggctccagcttgccctggcgacgccagcgcggcgttgaagcattgcacaggtgtagatcggagacgttatgctttacactaagggccactatttcttccagttccataactcatcctcggtatatgaacgatattgcgcataacctggcacaggtccgggacaaaatctcagccgctgccgcacgctgcggccgtgctccagaagaagttacgctgcttgcagtcagtaaaacgaaacctgcgagcgctatcgaagaagcgatggccgcaggccaggtcgcgtttggcgaaaactatgttcaggaaggggtggagaaaatccgctactttcaagagaccggggcaagcgggctacagtggcactttatcgggccgctgcagtccaataaaagccgcctggtggccgagcattttgactggtgccataccgtcgatcgactcaaaatcgccgctcgcctcagtgaacagcgccctgctcacatgccgccactcaacgtgctgattcaaatcaacattagcgatgagcagagcaagtcgggcattcccgttgacgagctggacgcgctggcggcagagatcgcgaaactgccgaatctgcagctgcgcggtttaatggccattcccgcgccagagtcagaatatgtaaggcagtttgccgtcgcccaacaaatggcggtagcatttgcgcggctaaaaacgcactaccctaccgtcgatacgttgtcgctgggaatgtcggatgatatggaagccgccatcgcggcgggaagcactatggtgcgcatcggaaccgcaattttcggcgcgcgcgactacagcaaaaaataaggaatctgaggaacgccatgaagacgttgactttcctgctctcaacggtcattgagctttacacaatggtcgtgttgttacgcgtctggatgcagtgggcgcgctgcgacttttataacccgttttcgcagttcgtggtcaaggctacgcagcctgtcgttgggccgctgcgccgcattatcccggcgatggggccgctcgacagcgcctccctgctggtcgcctttattctctgcgtcgtgaaagctatcgtgctgtttatggtcgtcaccttccagccgattatctggatctccgcgctgctgatcctcattaaaaccgtcggctcgctgattttctgggttctcctgctcatggcaatcatgagctgggtaagccagggacgcagcccggtggaatatgtcctgatgcagttggccgatccgctgctgcgtccgatccgcagactgctgccatcgatgggcggcattgatttctcgccgatggtgctggttctgctgctgtacgtgatcaacatgggtatcgccgaactgttgcaggctaccggcaacgttctgcttccggggctgtggatggcgctatgagtgccgtcgaagcctgcgctgatgggttggtcttacggctgtatattcagcctaaggccagccgcgacagcatcgttggtttacatggcgacgagcttaaagtcgccattaccgcgcctcccgttgacggccaggccaacgcccatctggtaaaattcctcgccaaacagtttcgcgtagcgaaaagccaggtgcttattgagaaaggcgaactgggccgccacaaacagataaaaatcattcatccgcagcagatccccgatggggtcgccgccctgaaagaataaacaggatctcatatgcaaaaagttgttctcgccaccggcaatcccgggaaagtgcgcgagctggcctcgctgctggcagattttggcctcgatatcgtggcgcaaaccgaactgggcgtggattccgcagaggaaaccggcctgacctttatcgaaaacgccattctgaaagcgcgtcatgccgcgcagattaccggcctcccggccatcgccgatgactcaggtctggccgtcgatgcgttaggcggcgcgcccggcatctattccgcccgctattccggcgaagacgcgaccgaccagcgcaatctcgaaaagctgctcgatgcgctgcgcgatgtgcctgacgatcggcgccaggcgcaattccactgcgtgctggtctatctgcgccatgcggaagatcccaccccgctggtttgccacggcagctggccgggcatcatcgctcgtgaagccgcaggcagcggcggctttggttacgacccgatattctttgttccgacggaaggtaaaaccgcagcggagctgagccgtgaagaaaagagcgccatttcccaccgcggacgcgcgctcaaactgttactggaagccttacgtaatggctaatttgccgcccctgagcctctatattcacatcccgtggtgcgtgcaaaaatgcccgtactgcgatttcaactcgcatgcgttgaagggcgaggtaccgcacgacgactacgttcagcatctgctgaacgatctgcgggccgacgcccactatgcgcagggacgtgaaatcgggactattttcatcggcggcggtacgccgagcctgctctcaggcccggcgatgcaaaccctgctcgacggcgtgcgggaagctcttcccctggcggacaacgcggaaatcacgatggaagccaaccccggcaccgtagaagcggatcgttttgtcgagtatcagcgcgcaggtattaatcgcatctccatcggcgtacagagctttagcgaacaaaagctccagcgtctcgggcgcatccacgggccgcaggaagccaaacgcgcggcaaacctggcaagcggtctgggactgcgcagctttaacctcgatttaatgcacggtctgccggatcagtctctggaagaggcgctggacgacctgcgtcaggcgattgcgctcaatccgccgcatctctcctggtaccagttgaccattgagccaaacaccctgtttggctcgcgtccgccgaccctgccggacgacgacgcgctgtgggatatttatgagcaggggcacagcctgctcagcgcggcgggctatcaacaatatgaaacctccgcctacgctaagccggggtatcagtgccagcataacctgaactactggcgctttggcgactacctgggcattggctgcggcgcgcacggcaaagtgaccttcccggacgggcgcattctgcggacggcgaaaacccgccacccgcgcggctatatggaaggccgttatctggagcgccagcatgatgtggaagatgcggataagccgttcgagttctttatgaaccgtttccgcctgctggaagcggcgccgcgagatgaattcagccgctacaccgggcttgatgagcgtacaatccgtccgcaaatcgatgccgccattgctgagggctatctgacggaagatgagcgctgctggcagattaccgagcacggtaagctctttttgaactcccttctcgaattattcctcagcgaataaacctcgctatgcttatcccgttataacaataacgggataattaattattcgcttttcccgaaatatcaatatcgctatttccgaatcatctcaattcaacatttccaataaaaataaattcacattcatttattaaaaataaatataacctaccgcacaaaaatacgtatttgatcgcctgattgcgaaaaagtgtgagtcagacagcttaaagatgtacgacaacaaggataatatgtcatacagaaacaaggaataccctttaagatattgaccaattaccctaagtgcatggagccgactcatgaaaaaactctctttttctcgttctctggcgtgtgtatctctgcttgccctgctcgcttccggcgccagcgcagctgaaaaagtcacgttaaaactggcacataacctcgaacgtagccacgttgtccatcaggcctttgaggcgatgtccaaagaggttaaccaactttccaacggtgatatgaagattcgtatatatcccagtagccagatgggcagcgcgcgcgaaacgatggagctattacaaaacggcgcgctggatatgaccaaaggttccgccagcgatctggaatcattcgataacgtctacgcgatatataatttaccgttcctgtttaaagatcagaatcacttcaataaagtcgtctttggtgacgtgggcaaggaaattatggagtccacgaaagataaaggattctttgcgctttccgcctatgttgccgggacccgcagtttttacaccaaaatgcccatcactaaaccggaagatttaaaaggattgaagatccgcgtccaggccagcccgacaaccttaaaaatggtcgaattaatgggcggttcgccaacccctatttcctttggtgaagtttataccgccatgcagcagggcgtggtggacggcgcggagaacaacgtgccttcctgggtgcaaacgcgccatatcgaaatcgcgaaagtgttctcagaagatgaacatgcctccatcccggatttcctcgttatctccagtaaaacctgggacaaactgacgccggatcagcagcaaatcctgatcaaggcggcgaaagcttccgaagcgtatcagcaaaaactgtgggacaagatcgacgccgacacccgcgcgcaggccaaagccatgggcggcgaaattatcaaagtggataaagcgccgttccgcgccgccgtgcagccgctgtttgatgagttcaaaaaagatccgaagcaggccgccctgctggccaaatttgaagctgccgccgaataacacttagcgggccagccgctggcccgctttcatcgggaaaacaatgatgatacttaaccgcataaagctggcggtggaccgcacgatcgccgcattctccgtcgccgttatgattgcgctggttgtttgcgtcgtctggcaggtgttcagccgctacgtactcaaccagcccagcaccctgaccgacgagctggcgcgctttttgatgatctgggtcgggctactgggtgcggcatataccgtcggcgcccagcgtcatctggctatcgacttactggcgatgacactccctccccgcaggcaggcgctgctcagcgtcatcattaatctgctgatctttatttttgccggatcggtgattgtgaccggcggcgtgaagctgattgaaaaaacgctgtcgacctcccaggtctcagcggcaatgcagatccccatgggctacgtctatctgatcctgccgttaaccggcctcattatgatgttttacgcagtatgttttgtcagcaacgggctaaaaaacatgaagcacgctgaagcgggggcaaattgatggacagctatatcgcactgatgctatttggctctttctttattctggtttttattggcgtacctatctccttctccatcggcatcgccaccgtcggttcaatgctgctgatgttcccgtgggatatcgcggtgattaccgtttctcagcgcctcgcgaacggcctcgataacttcgccctgctggcgattccattctttatctttgccggtacgctgatgaacagcggcgggattgccatacgcttaatcaatctggctcaggtgatggtcggacgcgtaccgggctctctgggccacgtcaacgtgctggcaaacatgatgttcggctcgatttcaggctcggcggtcgccgccgccgccgcggtagggggcacgctgaaccccattcagacgcagaaaggctacgatccggctttctccacggcggtgaacgtctcgtcgtgcatcacgggcctgcttattccgccgtcaaacgtgctgatcgtcttttccctgacggcgggcggcgtgtcggtcgcgtcgctgtttatggccggctatctgccgggcattctgatgggcctggctattatggtggtctgtgccgtcattgctaaacgtcgcggctatccggtttctgaacgccccacctgcgcccaggcggcaaaagcgtttttcgacgccctgcccagcctgctgctggtgattattgtgatgggcgggatcctcggcggcatttttaccgctaccgaagcgtcggctatcgccgtggtctacacctttatcctgtcggtgctcatttatcgggaagtgaaatggcgcgatctgccgaagctgatccttgaatcggtggtgatgacctctatcgtgctgctgctgatcggcttttccgtcggcatgtcgtgggcgatgaccaacgccgacattccctacatgataagcgatgcgctaatgggggtgtcagaaaacccggtggtgatactgctgctgattaatatcgtgctgttaatcgttgggatctttatggacatgaccccggcggtgctgattttcacgccgatattcctgcccatcgcgcaggatttagggatggacccggtgcatttcggcatcatgatggtcgccaacctgtgcatcggtctgctgacgccgccggtaggcagcgcgctgttcgttggctgctccatttccggcgttaaaattcagcagctcatcaaaccgctgctgccgttctacgccgccctgctgatcgcgctgatgatgattgtctatatcccgcagatctcgctgtttattccgcagctgctggggctgatgtgatcgactgaccataatcgctacctgcgggcgcaggtagcgaaataaaacttactttaacgaccccaccagcgctttgcggctctcttcgagggagaccacgcggctgcagacatccttaccaaactgctggaaatcggcttcctggtttttccattcatcctgaatggccgtttgcaggccgccaaggctgccgaggatcccctgcagcgggttaccgccgcctttaagaaccgccttcgcccccatctcgttgatgctatcctgcagaatgccgcccatcgcctgatttaccagctgctggccgtcggcgcgcacctgatcgatggctttatagtggaaggtcaggccatcgttacgatgttcaattatgcggctcatttgcgctttcaactgcgcatcaagcttggtcaggcggctatgcatgctgctgctggcccctacctgttcggtaataattttatccagcgcggcgcggcctttttctacccgcgtgcgggcgccttcatcaatccacggcaggctgctgcgcaggccagcctgatagtcctgagcctgctcgcgctgagcggcgttcagggaatacgctttaccgttaaaggtcaggttgccgtccggcttaatcaccagatcgccgttttcgccttttacctgcacctgctgcgggctgaggatgacatcgtcacgcggcgtgacgctacactggtagtccgcatgcgcggacaaagcggtgacggaaagcgccaatgccaacagcgttttgcgcatcatttaactcccttcagacaaaacgggccggcagttgccgacccttgtcaaacttagtcccaccagatatcaaaaagttcgctggtgcgtacatcggcaagcccgcggtcttccagccatttacgtacgatggcctggtgttcctcggtgcatttgccgatttcctgcaggcagatcaggccttcccaggaaagataaccgctgccgtcaaaggccagcttattaggctcaatcacctcatcaatcagatcgttaacggtctggtcgatctgctcttcgctggttccatccgcgaaacgccacgcgacggaaaaacccacttcctgaaactcgtcgatatgcatttttttacgcagacgacggctacgattcgttgccattatttcaccctctcgaacattaagtcccatacgccgtggccaagacgatggccacgctgttcaaatttggttaccgggcgcgattccgggcgcggcacatagtcgttgctttcagaccggttacgatacccttcaagcgaggacatcacttccagcatatgctcggcatattgctcccagtcggtcgccatatggaagacgccgcccagcttcagtttacttttcaccagttcggcaaaaggcggctgaacgatacggcgcttattatgacgcgctttgtgccacgggtcagggaaaaacagctgcaccatgctcagggagttatccggaatcatcgtatgcagcacttccaccgcatcgtggcacatgacgcgcaggttctgcacgccctcttcttcggcggacgccaggcaggcgccgacgcccggcgagtgcacttcaatgccgaggaaattctgctgcggcttctctttcgccatcgccaccagcgaagcgcccataccgaaaccgatctccagcgtgaccggcgcctcacggccaaacagcgcggcgaaatcgagcggcgcatcgttaaattcaacgcccatcaccggccaaatattgtccagcgcgtgctgctgacctttggtcaggcggccctgacgacggacgaagctgcgaatacggcgcagcggacggccgttttcatcgaattccggagatatgacgtcgtttttcataaaagttaagtctgcttgtgagagtgttcggaaaacgggcattatccaaagttacccggcggatgcaagggtttacagcctctcgcccttgtgctgcaatctgccaccttataatcgctatcccggagccgtagctttgacttttcccgccgcgcaattttcagcccaggtgctggactggtacgacaaatacgggcgtaaaaccctgccctggcaaatcggcaagacgccctacaaagtatggctctccgaggtgatgttgcaacaaacacaagtggcgacggtcatcccctattttgaacgctttatggcgcgtttcccaacgattaccgacctggcgaacgcgcccctcgatgaagtcctgcatctgtggaccggcctgggctattacgcccgcgcgcgcaatttacataaagcggcgcagcaggtggacaccctgcacgacggcaaattcccacagaccttcgatgaagtcgccgcgctgccgggcgtgggtcgctctaccgccggcgcgattttatccctttctctcggtcagcattatccgattctcgacggtaacgtgaagcgcgtgctcgcgcgctgctatgctgtcagcggttggccggggaaaaaagaggttgagaaacgcctgtgggagatcgccgaggacgtcacgccggccaaaggcgtcgagcgttttaaccaggccatgatggacctcggggcgatggtgtgtacccgctctaagccaaaatgcgagctctgtccgctgaataacggctgcgtggcttacgcaaatcattcatgggctcaatacccaggcaaaaaaccgaaacagacgatccccgagcgtaccggctatttcctgctgatgcagcacggcgacgaggtgttcctctcccagcgtccgccggtgggcttatggggcggtttgttctgcttcccgcagtttgaggatgaagatgccctgcgggcgtggctggcccagcgtcagattaagaccgataatctgacgcaattaaccgcgttccgccacactttcagccatttccatctggatattgtgccgatgtggcttacagtgcactcatccggcgcatgcatggatgaagggggcgcactctggtataacttagcgcagccgccgtccgtcggtctggcggctcccgtggagcgcttgttgcaacagttaaaagccggagcaccggtttagctttctggcgattaaagaggattaagaatgagcagaacgattttttgtactttcctgcagcgtgaagccgagggccaggattttcagctgtacccgggcgagctgggcaaacgcatctataacgaaatctccaaagaagcctgggcccagtggcagcataagcagacgatgctgatcaacgagaaaaaactcagcatgatgaacccggagcatcgcaaactgctggagcaggagatggttcagttcctgtttgaaggtaaagacgtgcacatcgaaggctacacgccgccagaaaaacagtaagggcctgacggccctttacaacaataaacacaacacgcactcccggaatgatgaaaaaatacttagcgctagcgctgattgcgcctttgctcgtttcgtgttccagctcaaccaaaaaaggcgccgagtacaacgaggcgtgggtaaaggacaccaacggctttgacattctgatgggccagttcgcccataacatcgagaatatttggggttataacgaagttctgctcgccgggccgaaggactacgtcaaatacaccgaccagtatcagacccgcagccatatcaactttgatgcggggacgattaccgtcgaaaccatcgccggcaccgacccggccgggcgcctgcgccaggcgattattaaaaccctgctgatgggcgacgacccgaactccatcgacctctattccgacgtcgatgatattcagatttcaaaagagccgttcctgtacggtcaggtggtggataacaccggcgagtcgattcgctgggagtggcgcgcctcgcgcttcgccgactatctgctgcaaacgcgcctgaaaagccgcagcaacggtccgcgcatgatctacagcatcaccatcaacctggtgccgaaccatctcgacaaacgcgcgcataaatacattggcatggtccgtcaggcgtcgcgcaaatatggcgttgatgagtcgctgatcctggcgattatgcaaaccgaatcttcctttaacccctatgcggtcagccacgccgacgcgctggggctgatgcaggtggtgcagcacagcgccgggaaggacgtattccgttcgcagggtaaatcaggcctgccgagccgcagctatctgttcgatccggtcaataacatcgacaccggcaccgcctatctggcgatgttgaacaacgtctatttgtccggcatcaccaacccgacctcgcgtcgctatgcggtcatcaccgcctataacggcggcgcgggcagcgtgctgcgggtcttctccagcgataaggttcaggcggcgaatatcatcaacaacatgacgccgggagatgtttatcagaccatcaccagccgtcacccctccgccgagtcgcgtcgttatctgtataaggttaactctgcgcagaaaggctaccgccgcaggtaatctccctccagcgcccttgtttcctcaagggcgtattccttctgctatacacaatagagttgcgcaactgttttgcgattttctgcggcagttaacaaaagcatccatcgcataaatgatagaatccaaccaaaataacgccataaatgttatttaaaacacaaaacaattctatatccgtgaggatcaaaacatgaatcttaagctgcagctcaaagtactgtcgttcctgcagttctgcctctggggaagctggctgaccacgctcggctcgtatatgttcgtcaccctcaagttcgacggtgcggccatcggagcggtctatagctcactcggtatcgccgcggtgtttatgccgacgctgctcggtatcgttgccgataaatggatcagcgccaagtgggtttatgccatttgccatctggtcggcgcgctgacgctgtggctcgccgcccaggtcaccacgccgggggaaatgttcctcgtcatcctgctcaactcgctggcctatatgccaacgctggggctgattaacaccatttcgtactaccgcctacagtctgcggatatggatatcgtgaccgatttcccgccgattcgtatctggggcaccattggttttatcctcgccatgtggggcgtcagcttctccggctttgaactgagccatatgcagctctatatcggcgcggcgctctccttgctgctggtgctcttcaccctgacgctgccgcatattccggtggccaatcagcagaaaaaccagagctggaccgccatgctgggccttgatgccttcgcgctgtttaaaaacaaacgtatggcgatcttctttattttctcgatgatgctgggcgccgaactgcaaatcaccaatatgttcggcaacaccttcctgcacagctttgataaagatccgctgttcgccagcagctttatcgtgcagcacgcctcggtgatgatgtcgatttcgcagatctcggaaaccctgttcatcctgaccatcccgttcttcctcagccgctacggcatcaaaaacgtgatgctgattagtatcgtggcgtggatgcttcgcttcggcctgttcgcttacggcgacccgaccccgttcggcaccgtgctactggtgctgtcgatgatcgtttatggctgcgccttcgacttcttcaacatctcgggttcggtgtttgtggaaaaagaggttcgcccggaaatccgcgccagcgcgcaggggatgttcctgatgatgaccaacggcttcggctgcatacttggcgggatggtaagcggtaaagtggtggagcactttaccgtcgaagggatcaccgactggcaaaccgtatggctgattttcgccggctattcgctggttctggcttttgcctttgtggcgctgtttaagtacaagcacgtccgcgtaccagccggggcgcagaccgtcgcacattaaataaacggcttaccccagatttacgagtaaaaaaacgcgccccggtgttatcagcgggcgcgtttttatgctttcagcacatagccatatagccgcttaatgccgtcagggtccgtttcgctgtagaccccctggagctccggcgagaagcccggcagcatattgacgccttcctccagcgccagaaaatagcgcagcaccgccccgccccagatttcgccaggcacgacgcacagcacgcccggtggatacggcagcgcgccctccgccgcaatgcgcccttcggcttcgcttaagcgcaccagctcaacgttaccgcgaataaactcgcggttggcgtcctgcgggttcatcaccgcgcgcgggaagctcctcttgcggaacatctctttttgcaaatccttcacgtcaaagctgacgtacaggttatgcatctcctggcacagctcgcggatggtgtaatcccgatagcgcaccggatatttattaaaaatggtcggcagaacatcggccagcggggtgtcggattcaatatgctgctcaaactgggcgagcatcgccaccagctgcgccagcttctcggcgctctctgcgggcgtcagcaggaacagaatggagttcagatcgcacttctccggcacgatgccgttttcgcgcaggtagtgtgccagaatggtcgccgggataccaaaatcggtatattttccgctctccgcatcgatccccggcgtcgtcagcagcaatttacaggggtcaacgaaatactgatcgctggcatagccttcgaagccgtgccagcgcgcgcccggctcaaagctaaagaagcgccgttcgcgggcgatggcttcagtgggatgatcctgccacggacgccccgccaccaccggtggaataaacggctggatcattttgcagttggcgataatcgccttgcgcgcttcaatacccagcgccacgcactccgcccacaggcggcgtccgctctctccttcgtgaattttggcattcacgtccagagcggcgaacagcggataaaacgggctggtcgaggcgtgcagcataaaggcgttgttgagccgcttatgcgggcaaaaacgttcctgtccgcgcaggtggttatcttttttatggatctgcgacgtttgcgaaaaaccggcctgctgtttgtgcaccgactgagtgacaaaaatgcccgggtcgtccggcgtcaggtccagcagcagcggcgaacagtcggccatcatcgggataaactgctcgtagccgacccaggccgagtcaaacaggatgtagtcgcacagaccgccgattttatcgaccacctggcgggcgttgtacaccgtcccatcataagtaccgagctgaatcaccgccaggcggaacgggcgcggcgcatcggctttttccggcgccgtctcgcgtatcagttcgcgcaggtatttctcatcgaagcagcgatcgtcgataccgccaataaaaccaaacggattgcgcgacgcttcgagataaaccggcgttgccccggcctgaatcagcgcgccatgatgattggatttatggttgttacggtcaaacagcaccagatcgccgcgcgtcagcagcgcgttggtcactactttgttcgccgcagaggtgccgttaaggacgaagtaggttttatcggcgttgaagaccttcgcagcgaacttctgcgcgtgtttggcagacccttcatgaatcagcagatcgccaagcttaacgtcggcattgcacatgtcggcgcgaaagacgttttcaccaaagaagtcgaaaaactgccgtcccgccggatgcttcttaaagaaggcgccgtgctgatggcccgggcacgcgaaggtgctgttatccatctcaacgtattgggtcagcgtatcgaagaacggcggcagcagattctcttcatagccgcaggcggcggcttccagttcgagccactcctgctctttgccgctaacgatggccgtcacgccttctggtttttcgtggtcagcgtcactgaacagataaaccggcaggttgaacccggtgcgtttcagtaacgcaaggatgccgctgcggctgtccgctacggtaatgacgactgccgccacatcggtaaaatctgtactgtccagggccacaacgcgacggtgggtggacaggcgggataccagctcgcggctggcggcaatgtgcattgatttcatgagcgcgaatacccgtttccggagagtaaaaggcttcggccagggcgtctgggctctggccaacgaaatgtcagggtctgactggatcccagctccgaccgccagacatcagtaaaagcagaccgcgtccgatcttactgttgtcctgcagtgagcctgcgttacgctcaccgcatggtgggcagaagttgcagtgtaagggtagcaagacgaggctgcctgcgcatctgtacgcagcggcaacggcgatgtagcggcgatgtcgtcatcacggcggcctcattcaggagaggagaaaattcgcgcaatcatgtcacctttaaatctaccgcgcaagatgaattacgtatgcagccataccacggatgcgcaagccttttggcccgtttagcgtcataataatgcagtcattagggataattaacaggagtcatgctgtggttacagggccatttattaacgccggcgcggtccttttgggcggcgtactcggcgcactcttaagtcaaagattgccggaacggattcgtacatcaatgacctctatttttggcctcgcgtcgctgggcatcggcattctgctggtgatcaaatgcgccaacctgccggtgatggtgctttcaacgctggtgggcgcgctgctcggcgaagtgtgcaacatggagaaaggcattaatacgctggtcagtaagctccagcagctgctttcgcccaaaaaggggcagaaaaaggtctcagcgcatgagtcctatattcaaagctacgtcgcgataatcgtgctgttctgcgccagcggaaccgggattttcggcgcgatgcgcgaaggaatgaccggcgacgccagcattctcattgccaaagcgtttctcgacttctttaccgccaccatcttcgcctgcaccctggggctggccgtctcggccatttgcgtaccgatgctggccatccagctggcgctggcggcctgcgcgtcgctgattatgccgttaaccacgccgatgatgatggcggatttcaccgccgtcggcggcatgctgctggtcgcgaccggtctgcgcatctgcggaattaaaatgttcgccgtggtgaatatgctgccggccctggtgctggcgatgccgatttcagtggcctggacggcgtttttcgcctgaagatgcgtgcttttgacgcaatgtggtgatagattgttcagtctgctgcgaaacagataaatttcgttgacgaggtgcggtgaatcaggtttaatgcgccccgttgcccggatagctcagtcggtagagcaggggattgaaaatccccgtgtccttggttcgattccgagtccgggcaccacttattcagagaacccagcctatggctgggtttttgcttttctgcgaccggactctccatcgaactccgttcgattattcgccgcacggcagtcttattttgcaagatattgggtggaaactcgcttatcagaagttatacccaaaacaacatgctaaatccggtcaaaacgacgatacaggcgacattcaaaaacaggccggcgcgcatcatctcctgctgcttgatatggccggtggcgaaaacgatagcgtttggcggcgtcgccacgggcagcataaaagcgcatgaagccgcaatggcaatcaataccgacagaatcacaggcgacatgccgaacgcttcggccactgaggcaaatacgggaataagcaaagcggcgctggccgtattactggcaaactcggtcagaaacaccacgaatgttgcaatcaccaggataataataaatatccccatatgagccaccatcccgctaatctggtttgccaggaacaagctggtacccgtctctttcaacacattacttaagcagataccaccgccgaataataacagcacgccccagtcagccgttttttctatatccttccagtgaaccacccgggcgaaattgactaatataatggcgcctaaagccacaatggtatcgaaggatttaaaaccgcccagtaggtcgttaatggggccgctgaaaatccagaagaatacggtaagcgcaaaaatagccagggtgacaactttgcctttatcccaatcgacctgctcagtattcgtttcgaaggtccccttaagttccggcctgaacacgaggtaaagaatcgcaatagcgactggcagtaagacgatcattgccgggaaaccgaacttcatccagtcaaagaaggagagccccacctcggcggcggcaatcgcattcggtggactgccgacgatggtcgccattccgccaatgctggcgctataggcaataccgaggagcacaaacacataggtcgaatggcggtttttgccatcgactttactcaggatccccaataccagcggcatcatcattgcggccgtcgccgtattactgatccacattgacagcagcgccgtcacgccaaatagcataaagaccgcgaggcgcattttgcccctcgccatcgctaataccttatcggcaatgactttatccagcccctgcacatgcattgccgccgccagagcaaagccgccgaggaaaaggaatatcgttgagttggcgaaactgtttagcgccgcctgggtattaaatacccccagaagcacggccatgacgggaaccatgattgccgtaacggtcacgtgcagcgcttccgttaaccataatacggcgataaaagcgagcatactcagccccattaccaccttcggctcatagggtagcgtgttgtagagaacgataaacaaaacaatatcgagcaaaatgatgatgctgttacgattaaaaaaccactcatgggtattggtgggtaaaggactcatgtcgtttttattcatagtagcttccttgtaactggttacgactgaatcattacatgtatatgtccttcaggtataaattatgttcctgttctgttaactggatcgtaccagacaatttccttgctgaatgacacccaggtcaggatatttccggaaagaggttcctgatagagacgatttattgaagcgagcaggccgactttattagctttaatttccttcatctgaatttctgtctttggctgctacgccggtatacgcggcgttgatagtttcaccaacacctaaaatagccccaaagaaccatcgattattttcggcaatccatttctgaaatagagataaagcagcgcgtaaaaacggataattcggtgaaaaaccgggcaaaagcgcgctattctggaaatcaacacgcccaggcggctaacaacctttccctccggacggctaaaaagcatcttatattcctttttgctcttagcggcagacaaaagttctttaaaatgccaattttgcagccctaccattcaaatcatctcgatacgaatgggcaaaatgttatgtcagtttttcattccgttagcgacctgattggtcatactcccctgctgcagcttcataagctggataccggcccctgcagcctgtttctaaaactggaaaatcaaaatcccggcggctcgataaaagaccgcgtcgcgctatccatgattacgcaggcagagcgcgaagggaaattaaaacccggcggcacgattatcgaagccaccgccggcaataccggcctcggtctggcgctgatcgccgcgcagaaaaattatcgcctgattctggtggtgccggacaaaatgagccgcgagaagattttccatctgcgcgcgctgggagcgcaggtgcagcttacccgctcggacgttaacaaaggccatcccgcctactatcaggactacgcccggcgccttgccgacaaaacgccaggcgccttttatatcgaccagtttaataacgaggctaacccgctggcgcatgccaccaccactgccccggaaatcttccagcagctggatggcgatattgacgcgatcgtcgtcggcgtcggctccggcggaacgctcggcgggctacaggcctggtttgcagagcactcccctgaaacggaatttatcctcgccgatccggcgggctccattctggcggaccaggtcgaaaccgggcgctacggcgaaaccggctcctggctggtggaagggatcggcgaagactttattccgccgctggcccatcttgaaggcgtccgcagcgcataccgcgtcaccgatagcgaagctttcgccaccgcccgccagctgctgcaggttgaaggcattctggcaggctcctctaccggaacgctgctcaccgccgccctgcgctactgccgggcgcagacatcccctaaacgcgtggtgaccttcgcctgcgacagcggcaataaatatctatcaaagatgtttaacgatgactggatgcgccagcagggctttttaagccgtccatcgcgcggcgacctcagcgattttatcgctctgcgccatgacgaaggggcaaccgtcaccgccgcgccggacgataccctggcggccatcctcgcgcgtatgcgcctctacgacatctcgcagctgccggtgctggaaaacggccgcgtcgtcggcatcgtcgacgaatgggatctaattagccacgtccagggcgacagtcagcgcttttctctgccggtcagggaagcgatgacccgtaacgtggagaccctggataagcacgcgccggaaagcgcgctgaaggccattttcgatcgcggcctggtggccgttatcgccgacaacgatcgttttcttggcctcattacccgcagcgatgtgctgaccacctggcgtaaccgactcgaacagtaaggacttctcaatgacaaatttgcataccctgagcgtacatagcggcacatttaccgatgaacacggcgcggtgatgccgcctatttatgccacctccacctttgctcagcccgcgccgggccagcataccgggtacgaatattcgcgcagcggcaacccgacccgtcacgcgctggagacggcgattgtcgacctggaaagcggcacgcgcggctacgcctttgcttccggccttgcggctatctcaaccgtgctggagctgctggataaagacagccacctggtcgccgtcgacgacgtctacggcggcacataccggctgattgaaaacgttcgccgccgcagcgccggcctgcgggtgagctgggtgaagcccgacgatctggcggccatcgaagcggccatccgacccgacacgcgcatgatctgggttgaaacgccgaccaacccgctgcttaagctggccgacctcagcgccatcgccgccattgcgcggcggcacaatattatcagcgttaccgacaacaccttcgcctcgccggctatccatcgtccgctggagctgggctttgatatcgtggtgcattcggcgaccaaataccttaacggccactccgatgtggtcgccgggctggcggtggtcggcgacaacgccgcgctggcggaaaagctgggctacctgcaaaacgcggtcggcggcgtcctcgacccgttcagcagcttcctgacgctgcgcggtattcgtaccctggcgctgcgtatggagcgtcacagcagcaatgcgctgctgcttgccgagtggctggagcagcagccgcaggtcgaaagggtctggttcccgtggctggcctcgcatccgcatcatcagctggcgcgcaggcagatggcgcttcccggcggaatgatctccgtggtggtcaaaggcgacgatggctacgccgagcggattattcgtaagctgaagctgtttaccctcgcagagagcctcggcggcgtggaaagcctggtgagccagccgtttagcatgactcacgcgtcgatcccgctggagcagcgtttagccaacggcattactccgcagctgattcgtctgtcggtagggattgaggatccgcaggatctgatcgccgactggcgccacgcgctgcgcgactaagcagattacccggcggcggctaacgccttgccgggcgacaagatcccccatcacatcaggcccgccgcccggcagagaattaagcagtctgcccgttctggccctgcccctgcagaagatgctcaacaaagcgcgtcagcttcggcagcggccgcagatcctgccgccagagcaggtgaatcggcctcggctgcggggtatacgcctcgagcacgcgcaccagtttgccgcactcgagcgcatccgccagcagcacttccggctgcagcagcagcccggcgccggcgatcgccgccgttcgcagcgcatagccatcattacagcgcagaacagcgtcgcgcttccagcgtacgccctcctccgcgcccggcagcttccactcattgcgcgcggtccacaccgtatgcgacaaacagagatgatcggccaggtccgcaggcgttgtcggcgtaccgtggcgggctaaatacccgggcgcggcgcagatcgtcatccggtagggcgcgagatattttgccaccagatcgttattgcggatctcgccgatgcggatcgccagatcgatgccctcatccaccagatcgaccatccggttggtcagatccagctccacgcgcacgtcgggccaggcctgcagaaacgtggcggtcagcggggcaatcacgcaggcgccaaacgacgtcggcgcgcttatccgcagcgtgcccgcgggcgcgacccgtagtctctccactgaactttcggcgatggagacctgctccaggacgcgtttcgcctcgtcaaaatagacccgcccggcgtcggtcaggctctggcgacgggtattgcgctcaagaagacgggtattaagctgccgctcgatcagcgcgatatatttcccgaccatcaccgccgacatctcgagccgcgctgcggcaccggtaaagcttccgcactccacgaccgcaataaaggtctccatcgcccgcagcttatccatattacaaacccctggttagtaattatttaacttttagccagtttatccgatatttgttttattaaagaatagcctctcacccgagagaggaacctgctatgaaaatcatcattattggcgccagcggtaccgttggccgagcggttgcgcaagaattaaaccagcgtcatgaagtcattcgcgtcggccgcactcagggcgactatcaggtcgatatcacctcacagcagagcgtgcagaacctgtttgcgaaaaccggtcgggtagacgcgattgtttccgccaccggcaatctcttctttggcccgctggcgaccatgaccgacagcgatttcaaccagggcttacaggataaactactggggcagattcgcctggcgctgaccggccagcattatctgaacgacggcggatctattacgctgattagcgggatcgtcgcccatgagcccatcgctcagggcgtcaatgccaccaccgtcaacgccgggctggaaggattcgttcgcgccgccgcctgcgaactgccgcgcggaatacgtattaacctgattagccccaccgtattaacggaatcggcggcagcctacgacggtttcttccccggttttaccagcgtccccgccgccagcgtggctcaggcctaccgccgcagcgtagaaggcgttcagagcggacggatctataaggtcggctactgaccggcgccgctgcgggccggaatgacgctgccggcccgcgacggcgtttacatcctgtttcatcaacggctacacttatccttcaatttgcctttttgaatgactcatgttgaagaaactcgcttttattgccccgcttttggcgcttatcgctctacttatctggtggttcatgccccgctacgccgaagaggacgtcgcgtactaccgctccgtcttctgcgttattgaccatcaggacagccgtgcgtttctccgcgatatggaaaatatgattgaaggcggtaattcggattatgcgctgcataagacccactacgtgcccgctctgggccaacggatgctggacacctggcagcagttgacgccggaagagcagaaaagtatcagccaggaccagcagcgctgtcgccagctgatgagcgaaaagcagcgcccggattaaggcatattactgcgcaaaatgactcgctgacaataatagaaaataacattctgctgcgacgagcggaatgttaaacataaacatggcgaatgaataacagtatttagcgcgcgaaaaagttatatttaaccgatatcctgacgttattatcaccctatttatttaaaaaaatcgttctggaaataattccgtcacaatcccctcctatatttccaagccttaataaacagtaaattataaccaataattatcgaggcttattttgattcgctatattcccgtttcgctctctctggtcgccgtcggcgtttccggcgtgctctacgctgcgccgataaatacgcccgtactcgctacgatggataatttccgcgatatcgctggcacgacgtctgtttataccaccagccacgacggcaccctgcgcaccggcgttttttatcgttctaatgctctggcattatcctccgcggaccaggcaacgctgagcacgctcggtatcagcgatgtttatgatttgcgcacggccagcgaaatcgccagcagcccggacgtgatgcccgacggggcgaggtatacccatattgatatcatcggcaacaccgcttcgggcagcaacatcacctcaataacgttcagtagcgccgctgaagccaaagcgatgatgcagcagaccaacgtctccttcgtcagcgatgccgggatgcgcacccggttcaccacgctatttaacgatctggccagcgccgacggcgcagcgctgttccattgtaccgcgggcaaggaccgcaccggctggaccgccgcgatgctgctgagcattgccggcgtcgatgaggggaccattatggaaaactacctcgccaccaacgactatacccgccagcgcgtcgaagcgaccctggcgatgatgccccccgccatggcggcaatttacgagccgctgctgggcgtcgatgccagctatcttcaggccgggctggatgaaatcagccgcgagtacggatcggtggataactatctgaagcagggcctggggctgtcgcaggagacgctctacgtcctgcgcggcaaaatggtgcagtacggccagctgccgggacaaagcgaactgcgggggaatgcggcgcagggcgctgcgctgcttaacgctctgcaaaacagcgagctatcgggccgctacaccgactataactattatctgcaatcggccattgatgccggaaccctcggcggcgtggagactcaggtcggcgggcagatttacgcggacgccgccagctacctgctgcgcagcggatcgcgattagacagggcgttaacgccgaatattgatagccgtcagctgcgggatggggaaggaaaactgtggctgaccgggcttagcggctatcttggcaccgatggttccgcccgcgccgccagcagtaatgagcataccaccggctcgctgctgggctatacctggcggtttaacgcgcagcttagcggctacggcactctgggatatagctggggctcgctgggcagcgccagcgccgatgcggatgccaacaccactctgctggggtttggcggtcgctatgcttttgaggatttaaatcatggcctctttgccgccgccgatcttaacgcaggctggatcgattatagcagtacgcgccggctgaatggcgggctgggtacggccaccggcgatacccatggccagctggttggcggcacgctgcgcctcggctacgtcagtccgctcgattttgccagcgttgagtacgccgtcgggacccgcctgacccacctgcggatggacgctttccgcgaaaacggcagcgagctggcgctcaacgtcgaccgcgtcagtgaaaataacgccagcggtattgccaatgtgagtatcgcatttcattcgcaaaacggtggcggctggcgcttcacgccggcgataaatatcggctatgaacacagtttcagcggcccttcggtacgcactcagggacaggtttatcactatgaggtcgtacagaacgcggccttcgatagccgtgacatggtcaacgctggcgccagtttgagcatcacgcgcggtgcgctgagcctgaaccttggcggccaggctgacgtcgccagcggcggcgacagccacggctacagcggcagccttagcgtgggctacgctttttaaacatccatagcaggccgccgcgggcggcttgctcttagccacgaaattgcaaagcggttaaacatacaccgccgaggatcggcgcatttttcgccgccatgggcaaaacgaaacgctggcaggaaaggtaaaacagaaattatgtttcaatccgctactggcagcggcaatcatcaatctgatgcatgattgtccttaccataaaaagtagttgatctggtatcgacaagctcttattttgcttctcagtttttaaacgagatgaaactgatgcctactattacagccagtagtatgaaagaagcaaaagagttaatgaattgtgggaagtacaaagaaatcgttctcaatttcgatattgatgctgacgattttttcaccctcgcaacatcccagtcaggaacaaaagtcaccatcacagacagaaataatcgctcatcggtcaaagcagaaaaataataaaaacccctgaggctcttcttatgctgttagctattggtaccgtcgctgttgcttttctttccacgttgatgctgatctggcttgacgatcgcattaccgaccaggattaacgaccggggccggcgataagccgcaaaaccgcccgcctctgtgtttctctcgcccgtagccatcggctgcgggcgattcaaaaaccccgccaatcccgttttcacattacgcactgatgattttcacccgccgggcaggtcatgcattcgcataaaaacaggggcttaaagaagaaaacgagaagggagccccgcgccgccgacggcgcggagcagggcgattacagcgacttcgccaggcgctcgacggcggtcatcagaccctctgtcgacaccgtcgagtaggacaggcgcagcgtgcgggtatccgggttatcgttatagaacgcttctcctggtacgtagaccacgccattttccagcgttttcttcatccattccatggtatcgaacggataacggaagcgagcccacaggaacataccgcctttaggacggctgaacgccagatgctcgccaagctgcgattccagcgcgtcggccagcgccacgcacttcttgcggtaatcttcgcggatcagggcaatctggctttccaggcggttcatgctcaggtattccgcggtgatgacctgcgagagcatattagtgtgcagatccgccgcctgtttaacgatcaccgtctgctgcgccagccagtccggcatcacgatccagccaatacgcatccccggcgcgaggattttggagaaggtggaggtataaaccacctgatcttcacagcccagctcaaccgcatactgatacagcggacgccgaacttcatcagtgaagctgatttcaccgtacggatcgtcttcgataatgacgaagtcgtgctttttcgccagctcaaccaggcggcggcggcgcgcttcgctcagggttttcccgccggggttgccaaacgtcggcaccagataaacggctttcacacgcgtggtttccagcagatcggccagctgttccaccagcatgccgtcatcgtcggtatccacgctgagaatattggcctgcgccagctggaagacctgcagcgccgccagataggtcggacgctcaacgacaatcgcatcacccggatcgagcagggtgcgggcgacgatatccagcgactgctgcgaaccggaagtgatatagacatgacttgccgaacaggccacgccgcgcgcctgacacagttcgctaacggcctgacgcagcggcggataaccttcggtcaaaccgtactggaacgcatcgttaaagcgcccgttcatcacctgctgcaccgccaggttcaggccttcggtatcaaaaagctccggggccggaataccgccgcccagagagataacgccgggcagcttactgtgcttgaggagttcgcggacggcggagggcttaagttcacccgcgcgggcggcgagtcgccgatcgtgcatactattttccttttctgtcttgttgttgtgatgttttatctatttttaccgttcattcccccggtcgcactatgctcactggggctacgggttcgtatgttcggtagcccggacagatgcgcagcatcgcctccgggttattcttcagcatcctgcggccttcccccgggggcggcgcgatgcgccttgcccgggctacaaatgccgcaggtgacgagaaccgcagcccggataaggcgctcaccgccgcaatccggggccaaacttaacggctatctgtgtcttttagcacgattaacggctcaatatcgctctcttttttaaccaccagagaatcatctccgcgcaggcaggtcccgccgtagttaccgccgacggtgaaggtgcaaacctggatgtatttgccatccacttttggcaggcaccacagctgctggtagatatttttgcggtcgaaaaactggccgctggttttatccagcacttcgtcctgcgggcctatcaggtcgatattgttgccgcagcggcccgagataggcttaaccgcatagccgctttccgccagctgctcgttgaccacaaaatccgtatccagaagatagcgatgattggggaacagcgaccacagcaccggcaaaatcgccttgttgccggggatgaccgtccacagcggctcgaagactaatacttccgggcgcagcagaacgtctatcaggcgcacttcattattcgggtgtccggtacgtatcggcaccgccgcgtactcatcggcgctgacttcccgcacctgctcaatggcggtctcccatgcccaggttttccagacgcagttgaccagacgaccgtcggcatcaatcagctgcccggcggcatcccagcgcagctcatccaggccaaacagaattttgctctcgaagccggcctgggtcagcgaacgctggataaactgcgcgtggtagttctcctccagatccttatcctgcatgatgtgcacgaaaggacgcgcccggctgtgcttccacgctccggccagctcatccagcagattttccgccgggttgtgaccggtgccgtagtagccctgcttcagccactgctcgaggatcagcccgccttcggtatggcaggacgcggaatcggcgttgtactcatacaccttgagcccgcgctcatccatacagaaatccatgcggccggtaatcatatgatggcgacggcgctgccacgagaggcgcagacgcggccagagaattttcggaatatcgaacagcgccagcaggctgtcatccttcatcaccttgtcggtagcgtgcaggtacatcagatgcagctcattggtggctttgataagctcctgctcggcgctttcggtgatggtgaaatactggtaagggtctttattgatgacgtggccgttggcttccacgtaggctttttgcagtgaatctttctcgttgagccagttgccgcggtattggcctttattcggcagacgcgcgcctttgatggccatcgcctcacccggcagcaccggctgcggcaggctgtgctcgatatcggcggtttggatcatccagccgaggatttcggtatcggcaaaggtgtctttaatcgtgtagaggccgtttttcacttccagcgtcagctcgcgggtccactgctggccctgcggcagcggcgagtgaatgacgttctgttcggcgatcctgaccttattccctatcagttgcgtaatcaccgccacgtggcccgtgtgcttaaactcgccgcctttctgccagatcagcagtgagccggcgagaggcggacggcgggagccgttggcgaacgcctgcagcggcagaatattgtcgttgaccacctcgcggagaaaacgcagggagaagatttcgtaggccatgccgacgtcggtgaaaacaaaaccgtaggtgaggaacagaaagcggcgcgcgaactccacgcactgccatttgtgccccatatactcattaccgatatagctgcggaacgtggcgtcatccggataatcttgcggatttaagctactgtaattagaagaataaatcgccacgccgcccggtgcgtagcctaatagtgtaccaaacggggcgtcactgcttgtggaacctttgctcatttagcctgacctcaaattaatgcagcccgggcagttggcgaaacaaaactccctcttcttatcctgccgcaggcacttaccagacagaggtggaatgatgataccactcattcgattcgctaatcgtgcccttaaggaaaataagcctgcgcccccgggcaaaagtgatatcgttatttgagataaaaaaacaatcaggagtcgacaatgagcacaccatcgcatctgaccgcccaaccgctggtctgggggcatggcccccgcacctttgaggtgttcctcgaacccacctgtcctttctccgtgcgggcatttaataagcttgatgacctgctggatgaagttggcgcggataacgtgacgatcaaaattcgtctgcagtctcaaccgtggcatctgttttccggcgtcatcgtccgctgcgttctcgccgcgtccaccctgccgcacggccgcgagcaggcgcataaggtgcttaaagccgtcgccgaccaccgtgaagagtttgagtttaccgaccactgcagcgggccgaacatgaacgccacgccgcagcagattatcgagcgtatcgaacgctatagccacgtctcgctggccgcggcgtttgcccgcccggagctgcaaaacgagatcaaatggcatagcaagtacgcgcgccagaacggcatccacgtgtcgccgacctttatggttaacggcctggtgcaggcggatctcggcagcggcgacgacgtcagcgtatgggccgcgcggattctggcttagtacgactctcccgcgccggcgcggtagcgccagcgacacgacatcaacacctcactaaaaaggcagatcagcatgtcagagaataactaccagccacctaaagtgtgggaatggaagcaaaacaacggcggcgcattcgccaatatcaaccgtcccgtctccggcgcaacgcacgatcgggagctgccggtgggcgcgcatccgcttcagctctattcgctggggacgcccaacggccagaaagtgaccattatgctggaagagctgctggcgttaggcgtcagcggcgcggagtacgacgcctggctgattcgcatcggcgaaggcgatcagttctccagcggctttgtcgaggttaatccgaactcaaaaatccccgcgctccgcgaccactccaccactccgccgacccgcgtttttgaatccggcagcatcctgctctatctggcggaaaagttcggcttcttcctgcccaaagatccggcaggccgcgccgaaaccctcaactggctgttctggctgcagggctcggccccgttcctcggcggcggctttggccacttcttcagctatgcgccggtgaaaatcgaatacgcgatcgaccgctttacgatggaagccaagcgccagctggacgtgctggacaagcagcttgcccgcggccgttttgtggcaggagaggagtacaccatcgccgacatggccatctggccgtggtacggcaacgtggtgctggggaatgtttacaacgccgccgagttcctggatgccggtagctataaaaacgtgctgcgctgggcgcaggatgtgggtaagcgccccgccgttcagcgcgggcggatggttaaccgcacctcaggcccgctcaacgagcagcttcacgagcgccatgacgccagcgacttcgacacgcaaaccgaagataaacgccaggcgtagcgcccatgcccgccggaggcttccgcctccggtttttagctttccagccgatagcccgccataaagtagcgctgcgcggtcgaggaacagccctctttgaagaagtccatcaccatatctctttccagaccatagcgacgggtaaggatccccgcttcccaggcgctgagctggcggtcgccggttttttcaaacatacggtgcgagtagccgagcacaaaaccgcgtttatagtcggcgcaaaaattcgccgcatgggcggcggtgtcagcatgggatgcctgtagccccgccattaagccttttccaaaatgattttccatcgcgccctcccaatcgttatatataaaattatatagcgattttttgagcgagcggtagcgctatttatggcgtttgcgctagcgcatatacttctcaaaccacgccagcgtgcgttgccaggccaggtcagccgcggcccggtcgtagcgcggcgtggagtcattatgaaagccgtggttaacgccctgataaatataggcctcgtagactttattatgcgccttcagcgcgttttcataggcgggccagccttcattaatgccgctatcgagtccggcataatgcagcagcagcggcgctttaattttatcgacctcattcagcggcggctggcggccgtaaaacggcaccgcgcaggccagctcagggatcgccaccgccgccgcgttgctgacgccgccgccgtagcagaacccggtgataccgaccttccccgtcgcctgcggatgcttcgccataaacgcgaccgccgcaaagaaatcattcatcagcttcacgggatcgactttctgctgtagcgcgcggccttcatcatcattaccgggatagccgccgacggagctcaggccatccggcgcaagcgcgatatagcccgctttcgccacccgccgggcaacggcttcaatatagggattcaggccgcgattctcatgaaccaccaccacggcgggcgctttgtcggctattttcaccggcgtcacctgataagcccgcacttcgccgtggccgtcaggagaagggtaatgaatatactccggacggatatccgggtcggtaaacgccacctgctccgccagagcatagtcgggcttcagcaggttaaacagcgccagcgcggtcatcccgccgacggtatacttccccgccagctggagaaactcgcgtttgctgattttgccgtgggcatagtagtcatagtattcgagcagctgctgcggaaaatctttggccgttagtcgcgtcatcaccctgcctccgttattaagcgccctttaagcaaagcagaagcccggacatacgccagcggagaaaagcagaaacggggagtaaaaagcccagcggccaacaccgccgggagaggagggatcagtgtttcactttggtcagacgatcgaggtagcccatcacaaaggccgacagcacaaaggtcaggtggatgatgacgtaccacatcagcttattgtccgggacgtttttcgcatccataaacacccgcagcagatgaatggaagagatcgccacgatggaggcggcaaccttatttttcagcgaagtggcgtccattttgcccagccagctgagcttctccttgccctcgttgatatccagctgggaaacaaaattttcatagccggagaacatcaccatcaccagcagaccgcccaccagggtcatatccaccagcgacagcagggtcagaatcatatccgactcactgacgctgaaaatatgcggcagtatgtggaagatctcctgaaaaaatttgatcgtcagcgcaatcaaaccgagcgaaaggccaaaataaaccggcgccagcagccagcgcgaggcgtacatagcattttccagaaagcgttccataagatcctgtcagttaacataaacggccgccattataccgcaacagggcaacgttatagcaacaggcgtccaacaagagagcgattcgaggcgataaaaaaggctggcgcaaggccagcctgagaagatgggtggagagaggttacttcgctttgacggtttcttcgcccaccaggccaatcttcagatagcccgcctggtgcagggtatccatgaccttcatcatcgtctcgtagtccacggttttatccgcgcggaagaagacggtggtgtctttcttgccttcggtcagcgcatccagcgaggcgatcatgctctcgtcggtaatggggtcattgccgaggaacatggttttatccgccttcaccgacagatagatcggcttttccggacgcggctgcggctggctggaggaagcaggcagattcaccttcacgtcgacggtagccagcggcgccgccaccataaagatgattaacagcaccagcatgacgtcgataaacggcgtcacgttgatgtcgtgcatttcgccgttatcatcgaggttttcgttaaaatgcattgccataaagcattaacctacgcgtagtttctgggcggtacgtaccggcttaacgccgctggcgctcaggtccaggtcgcggctttgcagcagcagaacctgggcggcgacatcgccaagggacgctttgtagctggcgatcatgcgggcaaaaatgttgtagatgaccaccgccggaatcgcagcgaacaggccaattgccgtggccagcagcgcttccgcgatacccggtgcaaccaccgccaggttagtagtctgggtctgggcaatcccgataaagctgttcatgatgccccagacggtaccaaacagaccaacgaacggagaaatcgcgccgatggtcgccagataaccgttgccgcgccccatgtaacgacccaccgccgccacgcgacgctccagtcggaaaccggtacgttctttaatgccttcgttatcttcagaacctgcggaaagctccagctcgttctgcgcttcgttaatcaaccgcgaggtcaggcttttcgcatcgaaaccgttagcgatatcgctggcctggtcgagagagcgtgcttcagcaaccagcagctgttcgcgcttgaggcgacgcttgctggccaggatctctgcgcctttgccgaaaaagatagcccatgtgactaccgacgccagaatcaggccgatcatcactaccttaacgacaatatcggcatgatgatacataccccaaacggagagatccgcctgcatcaaattattacccacactgtatctccaggacgtaaatcacaaaatctgcgcacaataatatcaaaacgacatcgaattgatagtggttctcattagtatttacactgtgcagcaaatcacgtttattttccttgcgcttacgcagtaaaaaagttgctgaccgcgccgttgataaaatttttacctgtatccgccgcgacccggtacatcaacgggtattcatgttagtttagacgtccagacgtataaaaacaggttatctgaacatggctgataaacatcttgatactgcgctggttcacgccgggcgcagcaaaaaatacaccctgggctcggtaaacagcgtcattcagcgcgcctcatcgctggttttcgacaccgtcgaagcgaaaaagcacgcgacgcgcaaccgcgccaaaggcgagctgttctacgggcgtcgcgggacgctaacccatttctccctgcaggaagcgatgtgcgagctggaaggcggcgccggctgcgccctcttcccctgcggcgcggcggcggtcgcgaataccattctggcgttcgtcgagcagggcgaccatattctggtgaccaacaccgcctatgagcctacccaggatttctgtacgaaaattctcgccaaactcggcgttaccaccggctggttcgacccgctcatcggcggcgatatcgcccgtctggtgcagccgaacacccgcgtggtgttcctcgaatcccccggctccatcaccatggaagtccatgatgttccggcgatcgtcgcggcggtacgtcgcgtcgctcccgaagccatcattatgatcgacaacacctgggcggcgggcgtgctgtttaaagcgctggagtttggtatcgatatctccattcaggccggcaccaaatatctgatcggccattccgacgcgatggtgggtaccgccgtgtccaatgagcgctgctgggcgcagctgcgcgaaaacgcctatctgatggggcaaatggtggatgccgataccgcctatatgaccagccgcggcctgcgcaccttagcggtacgcctgcgtcagcaccatgaaagcagcctgcagattgccgaatggctggcgcagcatccgcaggtggcgcgcgtgaatcatcccgccctgcccggcagcaaaggccatgagtactggaagcgcgacttcaccggcagcagcggtctgttctctttcgtgctcaataaacgcctgaccgacgccgaactgtccgcttatctggaccacttcagcttgttcagcatggcctactcctggggcggctttgaatcgctgattttagccaaccagccggaacacattgccgcaatccgtcctgatgctgaagttgatttcagcggcacgctgatccgccttcatatcgggttagaaaatgttaccgatctgctggatgatttagcggcgggcttcgcgcgtatcgtgtaaagtgacagtcagtggcaacaatagcggacgttttttagaaaaacggccgctttagttgcgcccgggatcaaggtgcccgagcctcttcaggagtacactagacaaaaaacacggtaccacttaggaaagtccatggttgtcattcaagaaattgtcgccgcgctgtggcagcatgattttgccgcgttggcaaacccccacgttgtgggcgttgtatatctggtcatgttcgcaaccctgtttctggaaaacggtctgctgcccgcctcatttttaccgggcgatagcctgctgctgctcgccggggcgctcatcgccaaaggcgtaatggactttgtacctacggtcgccattttaaccgccgctgccagcctcggctgctggctgagctatatccaggggcgctggctgggtaacaccgttacggttaagcgctggcttgggcatctgccgcataagtaccatcagcgggcaacctgcatgtttgacaaacacggcctgctggcgctgctggccgggcgtttcctggcgtttgttcgcaccctgctgcccaccatggcgggcatttccgggctgccaaaccgccgcttccagttcttcaactggctgagcgcgctgctgtgggttggcgtagtcaccggtctgggctatgcgctgagcatgattcccttcgttaagcgccatgaagatcaggttatgacctgcctgatgattctacctatcgcgctgctgatcgccgggctgctcggtacggttatcgtggtgattaaaaagaaatactgtaacgcctgatcgtttaccggggcggcgcggattcgccgcccttacatcgttcgtcacatcccctgaatcgttctgatacgcgccgcatcctcccccggcgtcatgccgaaataacgcttaaactcgcggctgaactgcgacgcgctttcataccccacccgcatcgccgccgcgctggccttcataccatcgtggatcatcagcatgcgcgctttatgcaggcgataggttttcaggtactgcagcggggaggtgctggtgactgatttaaagttatggtggaacgccgagacgctcatattcgcttctgccgccagctgatcgacgctgaggttctctgtgtactggctttcaatacgcttcaatacgcggctaatcaggctgaagtgggtctgacgactgaccagcgccagcagcgcacccccgcacggcccggtcagcacgtgatagagaatttcgcggataatctgtttgccaagaatgcgcgcgtccagcgggcgctccatgacatccagcaggcgctccgccgcgcacaatatctcttcggacagtaccgcagagttgattccgctcgacgccatggacggctgaaactgctcatcttccccgatatccatcagcagttcttgcaactgaagaatatcgacgttcagccgaatccccgccagcgggacttccggagtggcgaaggtttcgcattcaaacggcagcggtaccgtcagcagcagatactcattggtgtcatagcgaaaggtgcgctcgttaatgtagccaattttatgcccggaaaagagaaaaacgatccccggctgatacataaccggcgtgcgcgtccccggctgggtaccgtacagcaggcgaatatccggcagcagagcattaagcatttcttctttatctttcagctgattaaccttatgcgttaatagctggcatatctcagcgcggttcatttatcgtgcttctccgaacgtttttataccttcgcattgtgcgcacttccggcgaatttctccagccccaaggagaaatgggcaagacaacggcaggaatgtgcattgaggggaacggcccgcgggaacacaatgtccgtcatctggcagaggtattgtctctgttggcggttttatctatttgagggcaccagccatgaataatttcgacctacataccccaacccgcattctgttcggtaaaggcgcgattgaaaatctgcgcgatcaaatcccggcggatgcacgcgtgcttgtcacctacggcggcggtagcgtgaagaaaaccggcgtgcttgatcaggttctgagcgcgctgaacgacattgacgttcgggaatttggcggcatcgagccaaacccgtcctacgaaacgctgatgaacgcggtgaaaatcgcgcgtgatgaaaagatcactttcctgttggcggtgggcggcggctccgttctcgacggcaccaaattcatcgccgcggcggcccactacgatgccagtatcgatccgtgggaaattctcgaaacctacggcagcaaagtggccagcgctatcccgatgggctccgtgctgacgctgccggcgaccggttccgaatccaataaaggcgcggtgatctcgcgtaaaaccaccggcgacaaacgcgcgtttatgtccacccacgtccagccggtgttcgctattctggatccggtttacacctacaccctgccgccgcgccaggtggctaacggcgtcgttgacgcattcgtccataccgttgagcagtacgtcacctatccggtcgacggcaaaatccaggaccgctttgccgaaggtattctgctgaccctggtggaagacggcccgaaagcgctgaaagagccggaaaactacgacgttcgcgccaatattatgtgggcggccacccaggcgctgaacggcctgattggcgcaggcgtgccgcaggactgggcgacccatatgctcggccacgagctgaccgccatgcacggtctcgatcacgcccagacgctggctatcgttctgccggccctgtggaatgaaaaacgcgatgctaaacgcgccaagctgctgcagtacggcgcccgcgtctggaacatcaccgaaggttccgaggaagagcgcattgacgccgccatcgccgcaacgcgtgatttcttcgaacagatgggcgtcccgacgcgcctttccgcctacggtctggatggcagctccatcccggcgctgctggcgaaactggaagagcacggcatgacccagctcggtgaaaatcaggatattacgctggacgtcagccgccgtatttacgaggctgcgcgctaatcaacgccctctccgacgcgtaaactcgcgcaaaggagaggagtttaactaccgtttttagctatttcgtccagacttaatgctacccctcggcggaatttattccgctgagttcattaacaggaggaaggcatgacacatccaaccgttataaaactacacgacggcaacctgatgccgcagctggggctcggcgtgtggaaagcaggcaacgaggaagtcgtctccgccattcataaggcgctggaagtcggttatcgctcgtttgacaccgccgccgtgtaccagaatgaaaccggcgtcggcaatgcgttaagcagcgcaggcgtcgcccgcgatgagctgttcgtcaccacgaaactgtggaatgacgatcaaaagcagcccaaagaagcgctgcaggaaagccttaaaaaactgaagctcgactacgtcgacttatacctcattcactggccggttccggcaactaaccattacgtcgacgcctggaaaagcttaattgagctgcagcggcaggggctggtaaaaagcatcggcgtctgtaatttccaggttcatcatctgcaaaaaatcatcgatgaaaccggcgtcgctccggtgataaaccagattgaacttcacccgctgatgcagcagcgccagcttcacgcctggaatgcgacgcataagatccagaccgagtcctggagcccgcttgcgcagggcggcgaaggggtattcgatcagaaaattattcgtcaactggcggataaatacggtaaaaccccggcgcagatcgttatccgctggcatctcgacagcggcctggtggtgatcccgaaatcggtgacgccatcgcgcattgccgagaattttaacgtctgggacttccgtcttgataaagatgaattgagtgaaatcactaaactggaccagaacaaacgcctggggccagacccggatcagttcggcggttaacctttcccgctccgtcggcttccggcggagcatcgctttgctatctggctaaaaccacgtacattcagagtttattgcaatcaaatggatgcgtgctgatgagctgtattttctgccaaattgttgaggggaaagccccctgccataaggtgtgggaagatgaacaccacctcgcctttctctctattttccctaataccgacggttttacggtcgtgatcccgaagaagcactaccccagctatgcgtttgatatgccgccgcaggcattggccgatctggtgctggcgacgcagaaggtggcgaagcttttggataaagcctttgatgacgtgggccgtacggggatgttttttgaaggctatggcgttgatcatgtccacagcaaactcagcccgatgcacggcaccggggatatgacccaatggcggcctatcgagtcgcgtcagtctaagttttttgcgcaatatgaaggctatctctcctcccacgatcatgagcgggcggatgatgaaaagctggcggcgctggcggccagaatcagagaggcatagccatagaatttgctttgccgtttggcaagcggctgcccgggcccgaaattatcaggcccggtcagcgaagcgccagcgggcaatgcagtcaaattaacgaccggcgaccttaccgcgttttacgggcttcttcgccgtttccccgccgttcgagcgctggtgcacaatcggcgtatgcttggtcagcgccggacgggtatggcggttctggcgacgcgcttcgcgcatttcgtcgatcgtcggcgccggtaccaggcaatcgcgacggctgccgatcaggtgctttttacccatggtttccagcgcctggcggatcagcggccagttggccggatcgtgatagcgcagcagcgccttgtgcaggcggcgctgtttgtcacccttcggcaccaccacatcctcactcttatagccaatcttacccagcgggttcttgccggtgtaatacatggtggtcgagttcgccagcggcgacggatagaagttttgcacctgatccaggcggaaacgatgctgtttaagccacagcgccagattcaccatatcttcatcccgcgtgccggggtgggcggaaataaagtatgggatcagatactgctctttaccggcctgcttcgaataggtatcaaacagctgcttaaagcgatcgtagctgcccatacccggcttcatcattttcgacagcggtccctcttccgtatgctccggggcaatcttcagatagccgccaacgtggtgggtagccagctctttgatatagcgcgggtcttcaacggcgatgtcgtaacgtacgccggaagcgatgaggatctttttgatgcctttcaggtcacgggcgcggcgatagagattaatcgtcggctcgtggttggtgtccatatgcgggcagatatccggataaacgcatgacaggcggcggcaggtctgctcggcgcgcggcgacttgcagcgcagcatatacatgttggccgtcgggccgccaagatcggaaataatgccggtaaagccgggaaccgtgtcgcgaatcgcttcgatttcattgatgatcgaatcttcggaacggctctgaataatacgcccctcatgctcggtaattgagcagaaggaacagccgccaaaacagccgcgcataatgttaatcgagaagcggatcatctcgtaggccggaatgcgggcatcgccgtatgagggatgcggaacgcgcttatacggcagggcaaacacgctatccatctcttcggtggagagcgggatggcgggcgggttaacccagatatagcgctcgccgtgcttctgcatcagcgcgcgggcgcagccggggttggtttcatggtgcagaatacgcgacgcgtgcgcgtagagaaccttgtcgcctttcaccttctcaaaggaaggcagcaggacgtaggtcttctcccacggcttcggacgcgggggctgcacggtaacgcgcttcgcttcctgttttggcggtgcgacggttttgttatccgcgcacggcaaatcttcaccgtacggatgcggaatcgggtcgattttccccggcgtatccagacgcgtggaatccactccgctccagcccggcagcgcctctttcaccatgatggcggtgttgcgtacgtcacgaatttgcccgatgggctcgccggcggccagacggtgcgccacttccaccagaggacgctcgccgttgccgaacatcagcatatcggctttggagtccaccagaaccgagcgacgcacggtatcagaccagtagtcgtagtgcgcggtacggcgcaggctggcttcgataccgccgaggatcaccgggacatctttccacgcctctttacagcgctgggtatagaccagcgtggcgcgatccgggcgtttaccggcaacgttacccgccgtataggcatcgtcatgacgcagcttgcggtcggcggtgtagcggttgatcatcgaatccatgttgccggcggtgacgccgaagaacagattcggtttacccaggcgcataaaatcgtttttattattccagtccggctgggaaataatccccacgcgaaatccctgcgcttccagcatgcgtccgcaaatcgccatgccgaagctcgggtgatcgacataggcatcgccggtaaccagaatgatgtcgcagctatcccagccaagttgatccatctcttctcgcgacatcggcaagaacggcgcggggccaaagcaggcggcccagtactgcggccaggagaaaaggtcacgatccggttggatcagggatattgcgctcatattgcttccggggaaatgataaaaaaataatcaaaaagggcggcgattataagccggaacgatggaagaaatgaaggaggtttttccgatcccggccggcaggggccgggacagaatacattacggcgccggattcaccagaatctggccaatggagccccggtcggcaagctccagcgtctggcttaaatactggaacgggaagtgcggccaggagggctgattgtaatagaccaacagctcaacctggccgtcgatccaaacggtatccttccagccacgatcttccgggaacggcgcggagccgttgacgttacgcacctggaacatgacgccttcaatatggaacgactgcggccggtcggcgcgcacaatccagcgctcccaggtgccctgctgcgccgtaatatcgatacgctgcggatcccacagctgaccgttgatccccggatcgtcgccaagggtgatctcacggctgcgaatcgccgcgccggccagaatttccgtcggcagcaaacgcacgggcagactatcggtcaccagcggcagcaggcccgtcgggcgcaatgtcagaatcagcgtggagatcagaatgctcgacggctcgaagaagccgcgaatacgatcgacgatgcttgccgcttccccgcaggtgatagacacttcatcgccgttggtcatatcgaccagaatttctcgacgctcgcccggcgccagcgacagctgtttcagcgaaaccggcgcgggcaggagcccctggtcaccggaaatcacgtgcagcaatcggccatcgctcatctgcagctgatagcgacgggagttggacgcattcagcaggcgcaggcgcacccagccgcgcgacacctcaacgaaaggcccctgtacgccgttcaccagcagcgtatcgcccacgaaaccaccgctaccgggctcgctgtattcaggcgtaccgaagttatccagacgcttgtcctgaataatcaccggaaaatcatccacgccgtagtgattggggatcggcagattcttactgacatcatcttccaccagccacattcccgccaggccgttatagacctgttttgccatatggtttggggtgttagcctgataccacagggtcgccgcgctttggcggattggcagtaccggcgcccagtcggcgttagcggacatcatgcgcgcggcgccgccgatcagcggaccggggacctgcagaccacggatggtcatcgccacgttttccgtcaggcggttgctgtagatcagcttgacatcgtcgccgttccagacgcgaatggttggccccatatagcgaccgttaatcccccacaccgaggcgcgggtaccgggcgtaaacgaccagtgcgcgcgctgtagcgtcaagaatagcggctgcccgcggcgggactccagcagaggggggatcggcagcgcaggctgctggccagcggcctgtgccttcagcggcgcggcgcccgcgcacagcgctacgcctgaagccttaatgaactgacgccgactgagtgacatattaactccatgaaatactgactaattaataagggaattcgtttcccgccagcaatccgcgcgctgtttgcggcgtttcctgtgttatttctttgcggccgcttcgcgttcggcaacttctttatccagctcagcgattttcgcggacatcagctcgcggcagtgcgtggccagcgcgcgaacgccctcttttccatactggctggtatctaccggcggcagcatttctacaatcaccagaccgttattcaggcgattgagattaattttattcgatgtattagacacgcacaccggaataatgggcacgccagccgcgacagcagcatgaaaagcgccggttttaaaaggcagcaaaccgcggccgcggctgcgagtcccttccggaaacatccaaaaagagatattgcgctttttaaatgcgttcacgacttcggcaatagtgccatgcgcctttgcccggttattgcgatcgatcagcaggttccccgtgagccagtagagctggccgaaaaaggggatccacgccaggctctttttacccacggtcacggtcggcggctgcacgatatttgatgccgtcaccatatcatagttattctggtggttagcgatatagatagcgttgccgtagctttccgcgtcggctggcttgcgcagctcgactttcaggccgaagaccggcgacagtttgccaaacaggtggccgaaggtggcgacgtgcttagggttacgcgggctgaacagacaataaatacagccgaagatgcagaccagaatacaatagatgacaacgataattagtcgaaaaataaatagcatagctacctctgaaacccaaaccgcttagaattatactcgctgtttcgcagattgcaggcatcgggcatcattgcaaagcgcgttgcgcatctcgaatgacgctggcggatattgttcatcgcaatgcctgaataaacaacgattttgcggtaaatattaacctcccccgccaaaccgcgggggaggatgctcctactcttcgctatcgcccgcggaggcgcgacgcggtgaatcaatctccacccggtcaattttctgtaatccgcgcatcagagagccgcggcggccgcgctcgccggtgactttttgcagctcttccgggcgtagtttgattttccgtttgccgacgtgaatcgtcagcgtactttgcggcggcagaacgaacaggtgcgccaggccatcctggcccgcagccgcttccgccgacggaatactgatgatcttgttgcctttgcctttcgacagctgcggcaggtcgctcaccgggaacatcagcatgcggccggctgcggtaatggccagcagcatatcggactcatcctcaatcaccagcggcggcattacgtgcgcgttatccggaaggctaatcaacgtcttaccggcacgattgcgcgcgaccagatcgttgaaagtacaaataaacccgtatcctgcgtcggaagccagcagcagtttttggtcatcggcctccatcagcatatgttctaccgtcgcccccggcggcagcgtcagcttaccggtgagcggctcgccctgtccgcgtgcggacggcagggtgattgggtcaatcgcgtagctacgcccggtggtgtcaataaagaccaccggctgattgctcttcccttttactgcggctttaaaactgtcgcccgctttatagttcagccccggcgcgtcgatatcgtggcctttggcgctgcgcacccagccgctctgcgacagaacgatggtgaccggctcggacggcagcatatcgtgctcgctcatcgctttcgcttcttcacgctcgcgcagcggcgaacggcgatcgtcgccaaaggcgtcggcgtcggcctgcagctctttcttcagcaggttattcattttgcgttcagacgccagaatggcctgcagatggtctcgctctttttccagctcgttctgctcaccgcgaatcttcatctcttccagccgggcgagatggcgcagttttaactccagaatcgcttccgcctgggtttcgctgatgccaaagcgcgacatcagggccggcttaggctcatcttcgtgacggataatttcgataacttcatcgatattcagaaacgccaccagcaaaccttccaggatatgcaggcgcttaaggactttttccagacggtagctgagacgacggcgcacggtatcgcggcggaaagtcagccattccgagaggatttccagcaggttttttaccgccggacggttatcgagcccgatcatattcaggttgatacgatagctcttttccagatcggtcgtcgcgaacaggtggttcatcacctgctccatatccacgcggttagagcgcgggacgatcaccaggcgagtcgggttttcgtgatccgattcgtcgcgcaggtcatccaccatcggcagctttttgttgcgcatctgggcggcgatctgctcgagcacgcgggcgccggaaacctgatgcggcagcgcgctgatcaccaccgcgccgtcttctttcgcccacaccgcgcgcatccgcaccgaaccgcggccattctggtagattttgcggatctcggcgcggggggtgatgatttccgcttcggtcgggtaatccggcccctgtacgatatccagcagatcgtccagcgaggtctgcggtttttcaatcagggtaatggccgcctgagcgacttcacgcaggttgtgcggcggaatatccgtcgccatgccgacggcaatgccggtagtgccgttgagcagaatattaggcaagcgcgcaggcagcatcttcggctcctgcaaagtgccgtcgaagtttggtacccagtcaacggtgccctgccccagttcgctcagcagcagttcagcatacttcgacaaacgggattcggtataacgcatcgcggcgaaggatttaggatcgtccggtgccccccagttcccctgaccgtcaaccagcggatagcggtaagagaagggttgcgccatcagcaccatggcttcatagcaggcgctatcgccgtgcggatggtatttacccagcacgtcgccgacggtgcgggcggactttttgaacttggcgctggcgttgagacccagctcagacatcgcatagacgatgcgacgctggaccggcttcaggccatcgccaataaacggcagcgccctgtccatgatgacgtacatggagtagttcaggtaggcgttttccgtaaattcatgcagcgcaaggcgctctgccatatcgctcattaatcgtgaatcctcaatctgcgtaccggccgttcggacggcaaaactaccggcgataataccctatctgacgccctgagtcacagggcgttaggctggttgaggaattcagtggacatccttcatttcagcggaagataaacgtccgtctgcagctcatgttcaccgacttcatgcacgaaagtgaggtagcgaaagaaaacagggaaatcgcgcagcgactctcccgatgcgggcagccagtcgcgataaagaaaccagatgctctgcgcgagcgtgtccagagagccgtgatgacgcaccactgcgcaacgtccgccggggatctcgccattcaccacgccgaagctgttttccggcaccggctggctgaccgtaccgccaatatcgaaacgaaaatcgtcagccggcgtggccgcggggtcgtcccaggagattccccaggttgcgcagctggcgaccggggacagaccgctcaccttgcgccaggcgataaacttcgcggcggtctcattgactaaatcagggttgccgcgatgccgcagcctcgcgatctgagtggtaggtagctggattattttaacatccatcgggtgttgctcctgtagcgtatgtttcggcacgcgtcgatgccattccagccagtccggctgttgacggaactggctggggctttgcgcgaaagcgctgcggaaggcacgactgaacgactcaggattctggaaccccgcatcaagggcaatatcgataatcttttcctgtggattaaacgccagtcgccagcaggcgcgacgcagacgtagccactggatatagcgatagagcggtaccccgctataggcgctgaattgccggtgaaaatgatacggcgagctgtgggctatcgcactaagcgtctccagcgacagcggcgtgtccagatggcgttcaatgtacaagcacacttgctgaaaacgcccggcaaaggccgggcttacctgagtatcgttcatcgcatcctcccggaaacatactctgacagagcgaggagtgcggttcctgaccgatcttgcttaagatgataagaaaattatggcgcgattttacgaatctgctttacgtcgatttccactgagttccagtctttatccacttcaccctgaatctctaccgtatcctgcggggttacggtcacgccgttccagcgcttgtgatcgatatcgacgttcacggtgccggagctgtcctggaatttatacaggtcgtcggaaatacgctccacgattttaccgcgcagggtcacccaggtatcgtcacgcaggcttttcgcattcgcaaccgtcgttacgctcccgttcgggccaatgaacccgccgttttgcgtggtcgtctggctggtttgcgtcgagccgggtccggaaaatccgccctgcccggcggccagtaccggcatggaaactaaggcgatgatagcggtcattgcggcgattttcttcatgatgtgttctccctttgtgtttatatcgtcactattacaccgggcaaaacttaacgacttcttaagcggaaaaaataaatttcattcctgtacagcgcgcgccgcaacgcgctttactgcgggaatatccgagggacacaggagcagaaaatgcgcattttactggtggaagacgacaaactgatcggcgacggccttaaaaccggactgaccaagctgggcttcagcgtcgactggtttacccgcggcgaagagggcaaagccgcgctgtaccacgccccttacgacgccattattctggacctgaccctgcccggcatcgatgggctggatattctgcgcgaatggcgcgacaaaggccgccacgaaccggtactgatcctcaccgcccgcgacgcgctcagccagcgcgttgaagggttacgtctcggcgccgatgactacctctgcaaacctttcgcactggttgaagtcgccgcgcgtctggaagcgctgatgcgtcgcgcccacggccacagcagcagcgagctgcggcacggcaatgttgttctcgatccgggccgactcacgaccacgctaaacggcgagagcctgccgctcaagccaaaggagtttgctctgctggaactcctgatgcgcaacgccggacgcgtgctgccgcgtaagctgattgaggaaaagctctatagctgggatgacgatgtctccagcaacgcggtagaagtacacgttcatcatctgcgccgtaagctcggcagcggcttcattcgcaccgtgcacggcatcggctataccctgggggacgcatgaaacgactgggtagactaagcctgcgcgtccgcctgacgctgcttttcctgctgctgaccagcgccgcctggggcattgccagccttgtggcctggcaacaaaccgccgacaaactggataagctgttcgatacccagcagctgctgttcgcccgccgcctgagcgcgatgaatgttgacgaactccataccctcgctccgcaggtacgggagcagaaaaaggtcaaacatggccatctcgatgacgatgcgctggctttcgctatctttaccgccgacggcaaaatggtgcttaacgatggcgaaaatggccaggatatccagtggggtaaccatcgggaggggttcagcgatggctacctgcgcggcgacgatgacgagtggcgcttcctgtggcttaccacccgcgatggtcgccatcgtatcgccgtcggtcaggagtgggattaccgccgcgagatggcgctggatatcgtcacctcccagcttacgccctggctggttgcgctgccgctgatgtttttgctgctcatcgtgctgttgagccgggagctggcgccgctgaaaaagctggccaccacgctgcgcgcccgggcgccggactccgccgaaacgctaaatagcgagaacgtacccagcgaagttcgcccgctggtcgacgcgctaaatcagctctttacccggacgcatgacaccatgatccgcgagcgtcgcttcacgtccgatgccgcccacgagctgcgcagcccgctggcggcgctgaaggtgcagaccgaagtggcccagctctcaacggacgatccgcaagggctggataaagcgctggcgcagcttcaccaggggatcgatcgcgccactcgcctggtcgaccagctgctcaccctgtcgcgtctggattcgctggcgcagctggacgatctccagactatcgcccttgatgaactgctgcagtcggcggtcatggagatgtaccaccccgcccagcaggccggcgttgagctacgcctgcacctgaacgcgaaaaacatcatgcgcaccggccagccgctgctgctgagcctgctggtgcgcaatcttctggataacgccgtgcgctatagtgccgccggacgccaggtcgacatcatccttgaggcgggtgaatttcgcgtacgcgacaacggcccgggcatcagcgccgaggccctgacgcgcatcggcgagcgcttttatcgccctcccggccaggagcagcccggcagcggccttgggctctccatcgtcaaacgcatcgccgcgctgcacgggatgacggccagcttcgacaacgcccgggacgacggattcgaggcgcgcattcgctggtagcggcattattgcgaaaaaagcaaaagactttgcacattttgctcattttaccgctctgccctgcggggtaaaattagcctcaaaattgaaaagttgaggataaaaaatgagcaacatcctgattattaacggtgcgaaaaaattcgcccactctaacggccagctgaacgacaccctgaccgaggtcgcggatggctatctgcgcgacgccgggcatgatgttaaggtcgtccgcgccgagagcgactacgacatcaaagaagaagtgcagaattttctctgggcagacgtggttatctggcagatgccgggctggtggatgggcgcaccgtggacggtgaaaaaatacattgatgatgtctttaccgaaggtcacggcgcgctgtatgccagcgatggccgcacccgctccgacgccagtaagaaatatggttccggcggcctgattcaggggaaaaaatatatgctgtccctgacctggaacgcgccgatggaagcgttcaccgagaaagatcagttcttccacggcgttggcgtcgacggcgtgtacctgccatttcataaggccaaccagttccttgggatgagcgccctgcccaccttcatcgccaacgatgtgatcaaaatgcccgatgttccgcgttatacggcagaatatcgcaagcatctggcggaaatttttggttaactgtagtgagttatgaaaagacgacaagcgcggctcattttagcggcggcttgaagtatgatgagaatatacagaaggagttgagttaaccatgttgacagtgatcgctgaaattcgcactcgtccgggccaacaccatcgtcaggcggtgctggatcagttcgcaaaaattaccccgaccgttctccaggaagaaggctgccacggctatgcgccgctggtggatcacgccgctggcgtcagttttcagactacttcaccggattctatcgtgatggtcgagcagtgggaaagcgtcgcgcatcttgaagcgcacctgcagacgccgcacatgaaagcctacggcgaagccgtgaaaggcgacgtactggaaatgaatattcgtattcttgaagcgggtatttaagcaagcaaacgacatcggccggtttcccggccgattttttattatccgtccagctccgccagatcgcccttctcctgcagccagttacgccgatcttcagaacgcttcttcgctaacagcatatccatcatggcggtcgtctgctgctcgtcttcatcgttgataatcagctgtaccagacggcgggtattcggatccagcgtggtctcgcgcagctgcatcgggttcatctcgcccagccctttaaagcgctgcacgttcggcttgcctttcttgcgcttaagctgctccagcacgccggttttctcttcttctgtaagcgcgtaatacacctctttgccgaggtcgatacggtacaggggcggcagcgccacgtagacgtgaccttgtttaaccagcgtgcggaagtgcctgacgaacagcgcgcaaagcagcgtcgcgatgtgcaggccatcggagtcggcatccgccagaatacaaatcttgccgtagcgcagctggctcaggtcgtcgctatccggatcgataccgatggcgacggaaatatcatgcacttcctgggaagccagcacctcatcggaagagacttcccaggtgttcaggattttacctttcagcggcatgatcgcctgatactcgcgatcgcgcgcctgcttggccgatccgcccgccgaatccccttccacaaggaacagttcggttcggttcaaatcctgggcggtacagtccgccagcttaccgggcagcgccggaccgctggtcagctttttacgcaccactttcttcgccgcgcgcaggcgacgctgggcgctggagatcgccatttccgccagcagctctgccgactgaacgttctggttcagccacaggctgaaggcatctttgaccaccccggaaacaaacgcggcgcactgacgggaagagaggcgctctttcgtttgcccggcaaactgcgggtcctgcatcttcacggacaggacgtaggcgcagcgctcccagatatcttccgccgacagcttcacgccgcgcggcagaatattgcggtattcgcagaactcgcgcatggcgtccagcagcccctggcgcaggccgttaacgtgggtaccgccctgcatcgtcgggatcaggttgacgtagctttcggtcagcagttcaccgccttccggcagccacagcagcgcccagtcaaccgcttcggtatcgccggagaaggtgccgacgaacggtttttccggcagcagcggcaggccgttaaccgcttcgctaagatagtcggtcagaccatcggcgtagcaccagcgctgttcgctgtcgttaaccagatcgcggaaaacaatctctacgcccgggcagagaacggccttggcctttaataaatgagaaaggcgcgagacggaaaaacgcgggctatcgaaaaagctttcgtccggccagaagtgcacgctggtaccggtattgcgcttaccgcaggtaccggtcacgtggagatcttctactttatcgccgttttcgaacgcgatgctgtagacctggccgtcgcggcgcacgttcacctcaacgcgtttcgataaggcgttgaccaccgaaatccctacgccgtgcaggccgccggagaactggtagttcttattggagaatttccccccggcgtgcaggcggcaaagaatcagttcaactgccggaaccccctcttcagggtggatatccaccggcattccgcgtccatcgtcaatgacttccagcgactgatcggcatggagaatcacctccacgcgtttcgcgtgaccggccagggcctcatccacgctgttatcaataacttcctgaccaagatggtttggacgtgtggtatcagtgtacattcccggacggcggcgaaccggctctagcccggtgagtacctcaatggcatcagcgttatatgaagattgcgtcatggtgtgtattcgtaggtcgttccgaaccgctcagcgcaggcccagaaaatcgataatctgagtgaaatgatcttcaaagccaacaaatgcgtgattaccgccctcctctaccgtttgtcggcaggaggcgaaataatccacggcctggcggtaatcaagcacttcatcacccgtttgctgcaataaccagattaaatccggcgcttccagcgggtcaatttgcatgaccttgagatcgtaaatatggcgagactctagcacatattgctgccccgtgtatggattctcattggggccaaggaaattgttcaacagctcaaacgggcgcaccgcggggttcactaccacggcgggcagcataaagcactgcgatagccaggtcgcgtaatatccccccagcgacgacccgacaacgcccagcggttcaccgccatgctccagcacgatagactccagatgctcagccgcctgcgcgggataaaccgggagctccggtatcaccatcgagatgtcaggataggtctgcgccagccacgctttcagcgcagtcgcttttgccgaccgaggcgagctgttaaaaccatgcagatagagaagcgtagacatcagtatccttctgaagcgatatccgggtgaaatttcacgccttcgaggcggcaaacttcagtggtcaatgtgccgtcaggatgcagttccagccagcgccagcctggggagacggtatcgagcgtgaagttcgcgcagtgcggcttaaactgcacgcaggtggatggcgtggccatcatgcgccgtccgttccagtcaaggtccagctcctggtgaatatggccgcagagcagatgcttaacgcgaggaaaagcggccagcgcgcaatcaagcgccccggcattgcgcaggctatgctgatccagccagctacagcctgacggcaggggatgatggtgcaacagcagcagcgtataccgctgcggaacttcggtcagcttctgctcaagccattccagctggaaatcgctcagctcgccgtgcggcacaccgaacacctggctatccatcagcaatacttgccagtgttcgcccagcaatacgcgtttagcgggagagatgccggattcctgcagcgtactgtacattgccggttgaaaatcatgattacccggtagccagacgcagggtgcagtaaaactcgcgatgccttcagcaaaatgctggtaggccgcggcagagtgatcttgcgccaaatcgcctgtagcaacgatcaggtcgcactctcgctgtgaggcgtggatcgcatccagtacggcctgatagctttcccaggtattgatacctaacagcgtttcatgtttttcagcaaacaggtgagtatcggtaatttgtaatatcctgactctggcctcaccagccaaaggtaggtttaacaggctttccaaatggtgtccttaggtttcacgacgctaacaaaccggaatcgccatcgctccatgtgcaaaacagtatcgcagccaatcggccagaaactgattaatttgatgcttttcgtcgcgttgatgcaactttttattaggataatcataccgcgctttgaagcgaaagatctgctgacttgaacacacttcagcgaccattgcatcgtgatagagccgtaccgtcattgacggcagactccagtagctcaccgcaggcagagtctgttcaatcgccactaacgtagtgtagcgggtcgattcgatgatggttaatcggtattgcgcgttgcccacctggtaactcaccttttctcccgctgcatccgttcgcggcaacaggcggcgcagctgggcaaagttggtttcacacaggcgcatcatttcaggaaagtcaggcgtataacgcttcattttgtccactcgtttcgtaaattgtgataatgcagttgcagccattgcagcgcgatgacagaggctgcgttgtcgattttcccctcttccacccatctgtaagcctgttcccggctcaccacatgaacgcgaatatcttcgttttcgtcggccagtccatgaattccttttgccgtcgttgcatcgacttcacccaccataatagacagcctttcgctggtgccgccggggctggccaggtaactcagcaccggtttcacccggccaacaataagcccggcctcttccaccgcttcacgacgggcgacatcttcaggagactcaccttcttctatcataccggcgaccatttcgagcagccacgggctcgcgctggtatcatacgccgcaatacggatctgctcgacgagcacaacttcatcacgtaccgggtcaaagggtagcaagactgcggcgtggccgcgctcaaaaatttcgcgggtcacttcgccgctcatcccaccgttgaacaggcgatggcgaaaacgatataaatcgagcgaaaaaaaaccgcgataaagcgtttcgcgtgcaataatttctacatcgtttttagagaaggtaatcccctgctgattgacgtcgctcatttcgatatcctgtagaacatgaagttatgaatttataggcggtgtggctaccgttttacggctcgtatgctagattggtgcaaattaccgccccatggcacataacgccaactttttacggtaacagactctatacaatcagtgattatttttagaatttgagtagcgctaaatgcttcacaacaaggaatgcaaatgaagaaactctttcccatccttatcggcctgggcctgactggcttcagcgccatgagccaggctgaaaacctgctgcaggtttatcagcaggcgcgtgtcagcaaccctgatctgcgtaaatcagcagccgatcgtgatgccgcattcgagaagatcaacgaagcgcgtagcccgttattgccacagctcggtctgggtgcagattatacctataccagcggcttccgtgatgctaaagaccagaattccgacgtcaccagcggatcgctgcagctcacgcaggttctgtttgatatgtcgaaatggcgtgcgctgacgctgcaggaaaagaacgccggcattcaggacgtcacctatcagacggatcagcaaacgctgattctgaacaccgcgacggcctattttaaagtgctggccgcgatcgatacgctctcctataccgaagcgcagaaacaggctatttaccgccagttagatcagaccacccagcgctttaacgttggcctggtggcgattactgacgtacagaacgcccgttcgcagtacgatgccgtgctggcgaatgaagtcaccgcgcgcaacgacctcgataacgccgtagaagggctgcgtcaggtgaccggcaactactatccggagctggcctcgctgaacgttgatggttttaaaaccactaaaccgtcggcggtgaacgcgctgctgaaagaagcggaaaaccgtaacctgtcgctgctgcaggcccggctcagccaggacctggcgcgcgagcaaattcgccaggcgcaggatgggcatctgccgaccctgaatttaaacgcgtccagtagcgtatctaataacagctacagtggctctaaaaacaccacgcaggacagagatatcgggcagaaccaaatcggcctgaacttctccctgccgctgtatcagggcgggatggtgaactcccaggttaaacaggcgcagtacaactttgtcggcgccagcgagcagctggaaagcgcacatcgtagcgtggtgcaaaccgttcgttcctcttttaacaacgtgaacgcgtccatcagcagcatcaatgcctacaaacaggccgtggtgtctgcccaaagttcactggatgccatggaagccggttattcagtgggtacgcgtaccatcgtcgatgtcctggatgcgaccaccacgctgtataacgcaaaacagcagctgtccaacgcgcgttataactacctgattaacgagctgaacatcaaatccgcgctcggtacgctgaacgagcaggacctggttgcgctgaacaatacgctgggcaagtctattccgacttcaccggatagcgttgcgccggagaacccgcagcaggatgccagcgctgacggctacagcaacaccgccgcggcaaaaccggcatcagcccgcagcaccagcggcagcaatccgttccgccagtaatcaagcttgcgcagtccgcgcttcgcttacccgccgggtaagcgaagcgttaaacgtaaggcaacgtaaagatcccccgctttccgcccctattcgcttcattttccaccactcatcctctatcctgagcgttaacaaaacgcataccactgggtccaggaagacaaacatgaaacggacaaaaaatattaaacacgcctccttccgcaaaagctggagcgcccgtcatttaactcccgttgcgctcgccgtgacggcggtatttatgctcgccggttgtgaacaaagcgatgaaacggtttctctgtatcaaaacgccgatgactgctctgccgctaacccgagtaaatccgcagagtgcaccaccgcttacaacaacgcgctcaaagaagcggagcgtaccgcgccaaaatacgcctcccgtgaagactgtgtcgccgaattcggtgagggtcagtgccagcaggcgccggctcaggcaggcatggctccggaaaaccaggcccaggcgcaaagcagcggcagcttctggatgccgctgatggctggctacatgatgggccggatgatgggcggcggaatgggcgctcagcagccgctgttcagctcaaaaaacccggccagcccggcctatggtaaatacaccgacgcgggcggtaagagctacggcgcagcgcagccgggccgtaccatgaccgtgccgaaaaccgcgatggcgccaaaaccagccaccaccagcaccgtgacgcgcggcgggtttggcgactcggtcgctaagcaatcaaccatgcagcgtagctcagcaagctcctcttcttcacgctcgatgggcggctaagcgacatggaaagaatcagcattaacgagcgcccggactggcgcgaaaaggcgacagagtatggctttaactttcacaccatgtacggcgagccgtactggagcgaagaagcctattacaaactgacgctggcgcaggttgagaaacttgaagacgtcaccgctgagctgcatcagatgtgtctgcaggcggtggaaaaagtcatcgccagcgatgagttaatggccaaatttcgcatccccaaacacacctggggcttcgtacgccagtcgtggaaaacccatcagccctcgctgtattcgcgtctcgatctcgcgtgggacggcgtgggtgagccgaagctgctggagaacaacgccgatacgccgacgtctctctatgaagcggcattcttccagtggatctggatggaagatcagctgaacgccggtcagctgccggcgggcagcgatcagttcaacagcctgcaggagaagctgatcgatcgctttggcgagctgcgcgagcagttcggcttccagctgctgcatatggcctgctgtcgcgataccgttgaagaccgcggtaccgtgcaatatttgcaggactgcgccgcagaagcgggcgtggtaaccgagttcctctacatcgaagatattggtctcggagaaaaaggccagtttaccgatctgcaggatcaggtgattggtaatctgttcaagctctatccgtgggagtacatgctgcgcgaggtgttctccaccaagctggaagatgccggcgtgcgctggctggagccggcgtggaagagcattatctccaacaaagcgctgctgccgctgctgtgggagatgttccccaaccatccgaacctgctggccgcttatttcagcgaagatgcgcatccggagctggagaagtacgttatcaagccgatcttctcccgcgagggcgctaacgtctctatcgtggaaaatggcaaagtgctggaggcggtagaagggccgtacggcgaagagggcaccatcgtgcaggcgttctatccgttgccgaagtttggcgacagctacacgctcatcggcagctggctgattaacgaccagccggcgggtattggcattcgcgaagaccgggcgctgatcactcaggatctgtcgcgcttttatccgcacattttcgtcgagtaacatcgaaccccggcggcatcgtttactgccggggtttatctattttcaggcgccaatgaccactgacagcatgctcagggagcccatttccattccttcaaccgggatcgtaatcggctcttcaccgtcccaggcgcccagcacgtacagcagcggcagaaagtgatcggccgtcgggttcgataacgatccgccttcatgcgccaggtaattcaccagcggatgttccgctacgggacctttccagtccagattcgccttcacgtagtcattaaacgacgccgcccagggataaggtgtattttcgccgtgccagcgtgcggtacgcaggttatgcaccacgttgccgcttgccaccagcataatgccctcatcgcgcagctgggccagcttacgccccatttcgaaatgccatgccgcgggcttcgtactatcaatactcagctgtaccatcggaatatcggcatcgggatacattttaatcaacacgccccaggaaccatggtcaaagccccaggcttctttatccagcgtcaccggcaccggcgccagcagctcaaccagacgctgggccagttcaggcgaacccggcgccggataatgcgtatcgtagagcgcctggggaaaaccgccaaaatcatgaatcgttttcggcgcctccatcgcggtcactcctgtaccgcgagtgaaccagtgcgcggagatcaccacaatggctttaggccgcgccagcgtctcgcccagatgccgccaggcgcgagtatagatgttatcttccagcacgttcatcgggctaccgtgacctaaaaacagcgcgggcatgcgggtacgggacatagtgatatcctttattaagaaagttgatgtatttacattacgctctttctatggaggataaactcagataagcatgatgatgatcgtcagaaaatttgaatgtaagcggcggtaaagagtgaatccgcgcgctcgcgatcgtcaatggaacacgatactcttaataagaattattttcataaggaggtgaatgttgtcctcacccgtcattctgaccctgctggcagggagcgctacctttattggcgccattttcggcgttatcgggcagaaaccctcgaatcgcttactgggattctcgctgggattcgccgccgggatcatgctgctgatttcgttgatggagatgctgcccgccgcgctggctaccgaaggcatgtctcccctgctaggctacggcatgtttattatcggccttcttggctactttgcgcttgaccgcatgctgcctcacgcccacccgcaggatctgatgtctcccggcatttcccgcccgcgtaacctgcgccgtacgacgattttactgaccttaggcatcagcctgcataacttccccgagggcattgcgaccttcgtgacggccagcaataatctcgagctgggcatgggggtcgcgttagccgttgcgctacataacatcccggaaggactggcggtagccggaccggtatatgccgctacgggctccagaagtaaagcggtgttctgggcgggtctttccggcatggcggaaatcttcggcggcgtgctggcctggctggtgctgggcagcgcgatatccccggtgatgatgggcgccgttatggccgcggttgccggtatcatgattgcgctgtcggttgatgagcttatgccgctggcgaaagagctcgatccgcaaagcaacccgagctacggcgtgctgtgcgggatgtcagtgatgggattaagcctggtggttttgcaaacggtgggcattggctgagccaatgcgccaattatttgcagcgctatatttcacttgtcaatttatcacataaattcatcacaatgatggattgagaatagatatttgatttaacttttagtcaattaaaaccctacataaatagcgtttttacagcgcccctccatttatttggcattaacttaacgtaatttttcgggtatcacacgaaaattcattcacacaaacaataaacatacgtaaaaccaccgttaaaagagagtgtgtgttgagaaaaaccctaaaaaaagcgcattgaaatacatgtattaaggaaaactgcgagttacctttaattacaattaacatgcgtaacagtgagcagcatgatactttttacgcgttgaattaatattaattcaagcaaaaccaatcccataccagttgtcgtatacctcatatttaatattgatcatctataaaggactatattccatgtttaaaaaaacgctgcttgctgttgccaccaccgctgttttttctgcgacggtttttaatgccagcgcagaagatcagggccacggtattgtcaccttctccggtaccgttattacctccccttgctctgtgacaccggaaagcgctcagattgatgtcgatctcgggcaggttgccgatagcgtactgaacggcggccagtactctcagcctgcagatttctctatcaaactgcgcgattgtattctgagcacaacggatgataaaggcgttaaaacgacaacggataaagtgagcgtcaccttcacttctgccaacgtcgacagcagcgacgccagcctgatggtgaataccaaagaaagcaactacggtggcgctaccggcgttggcgtacgtatcatggacgcaggttacaacaccgtaaccctgggctccgcagtaccggtagtgtttaccgataccaacccgacgcagaatctggacttccacgcccgcatggaatctaaaggtaaaaatgcgaccgagggtgatgtttacgctcaggcaaactacgtcctggcttataaataattatcgctttcgcttaatttttattgattcaggccggtgagggattcaccggctttcccggtctattttattaaaagaaacggattttatgcgtactatcattcatagcggtttaacgccaggaaagctatcccttttaataaagcataccctatactcagtagctattatcgcatcgctatcaatgccgctttctgcactagaattcaataccgatatgattgatgcagaggacagggaaaatatcgatctctcacaatttgaaaaaaaaggttatatccctgtcggcacctatttggtgcgcatacagatcaacaaaaacaccttaccaaaagcctatcacctggagtgggtacaagccgataacgaaagcggttctcagctttgcctgactaaagagcgcctggcagagttcggctttgccgacgcgtttattgagccactacacgtgtgggctcaaaaaggctgtctcgatctcagccatcagccagaactgattattcgtctggataaagcgaacatggtgctgacgttaaccgtacctcaggcatggatgaaatatcaggctaaaaactggacgccaccggagtactgggacgacggtatcgcgggtcttatgctggattataacctgtacgccagccagtacacgccgagccacggcgacagcaaccagagcgtcaactcatatggcaccctgggtttcaatctcggcgcatggcgcttacgtagcgattatcaatacgatcaatcgtttattgagcgtaaatcaacgggaaccagcagtagcctgccgcgtacctatttattccgcccgattccgtccctggcgtcaaaattcacaatgggccagtacgacctgagctcaggcctctacgatactttccactttaccggcgcctctctggaaagtgatgaacaaatgcttccgccggatttacgcggctatgcgccgcaaataagcggcattgcacagaccaacgctaaggtcaccattacgcaaaacagccgcacgctctatcaaacgaccgtctcccccgggccattcaccatcgccgatctgggcacgaccttgcaggggcaactggatgttacgatcgaggaagaagacggacgcaaaagtacgtttcaggttggttccgcctctatcccttacctgacgcgtaaagggcaggtacgttataaaagttcactgggtaaacccacatcaacgactcacaacgatgtgaataacccccttttctggaccggggaggcttcctggggctggttgagtgatatctctctctacggcggcgctatcgtcaccgccgatgactatcaggcggcaaccggtggggttggctttaaccttaaccgttttggctcattctcccttgatattacccgcgccgaggccaatctacgtaatgacgatcaaggtaaacagcgcggctttagctatcgcgctaactatgccaaacgttttgaagaaacaaacagtcaggtaaccttcgcgggttaccgattctcagataaagaatacgtcacgatgagcgaatatatcagctcgcgcgatggttccgactccagttccaatgagaaagagagctatgtgctctcctttaaccagtacgttgcgccgctggagctaaatacctatctgagtatcacacgtaatacctactggaacagtcaaaccaatacgaactactcgttttctctgagccgtagctttgatattgccgcgtttaaaaatatttcagcttcattggcgatgagccgtgtgagctggaataataatcaagaaaatcaatattacctttcactctctctgccgctagaaaataatcgcaatattatgtacagcctgcagcgctatggcgacgacgcaacgacgcaaacggcaacctggtacgatggttcagatcgtaataacccgtggaatatgtccgtttcaggcacagataaagagtttggcgatggcgaagcggccatgcgcgggtactatcagcactattcaccctatggccggttgaatgtaaacggtagcgtgaagccgagcagctatcgctcgttcagcgctggctggaacggctcatttacggcaacccgttacggtgcggccttgcatgactacaacacaggcaacagttctcgcgtaatggtggatgcggatggaatagccggtgttgaggtgaacaataaccgtagtatgaccaatatgtttggtatttccgtggttccgtcagtgggtaactacacaactgcgacggtaatggtgaacaataacaacctgccggatggcgtggatgttaccaactccgttatccgcaccacgctgaccgaaggtgctattggctatatgcccctgagcgcgaccaaaggctatcagatcatcggcgttatccgcctggaagacggacgctatccaccgctgggcgtgaccgtaaccgacaaagcaaccggtcgcgatataggtttagtcgctgatgacggctttgtgtatctgagcggaatacaggaaaacagcatcctgacgctaaaatggaacgacaacgtgtgtgatatgacgccgcctaaccatagcaacatcaacggccaggccattattttaccatgtaaacccgcacattaattcaggatgaatgatgatgaaaattaacacgtttgcgaaaggactattatttctgttgggtaccagctttgcggtaaatgccgccgtgtcgcccgacagaacccgcattattcttaaccagtcggataagagcgtctccgtgcgcttgaccaaccagagcacaacaatccctttccttgctcaatcatggattgaggacaaggataataaaaaatcccgaaactatattactgctgttccgccaatggtgcgcctggaggcgggtgagcaagtacaggtacgcctgattcctcagccaacgttgacgcagcttccggcagacagggaatcgctgttttatttcaatgtgcgcgagattccgcctcgctcggaacaaaaaaacgtcatgcaaatcgccatgcagagccgcattaaaattttctggcgaccaaaggctgtcgaagtgaagaacggacaggtgaatctgaccggtaaattcgatattagccgaacggccagcgggttaacgttaaagaataactccccctattttatcaccgttggttatatcggcacgaatggcaaaacgctgctgccaaaaacatccagcatgatggctgaaccgtttggccaggcgtcgcaggagattaaagacctgcctgctaatttccaggtgggctttattggcgattatggtggtctgaatatgtttaaaattagctgtaattcggtacaaatagtatgtcagtctgaaccagtgaaaaggggctaataatgaaaaaattattcattttttttattttgctgatttgccttttttcatcatcatcctgggcaatcgactgttatcaaaataactacggtggagaccatctcgttaccacatcactgccgccatttactgtccccgcagacgcacctgttggaaaaaaaatatgggaaagcggcgatattactgtaaccgtttattgtgatgaagcctcacataacaataaagatcccaaatcgccttggtcagaaaacgtttatgcttatattctggatagcttccataacaccgataacctggttaccaataattcttatctggcatttggtgtaacctataatggtgtggattacgacataccgaacacaaaaatcaatacaggcgcatgccttgatcaaatgagtgactttgaccagtcatataagcataaggcatgtaatggccatacaatccagaaaaacacgacatttaccgttcgttttcgcttatacgttaagctaaaatcaattccaccttcacagatagagtataattttcctgcagtcaccgtattagcctttgatggttctggaggaataaaccggctggcgcatgctaaaaacttgcactatgatattgacgggctttcaaacattcattttttagattgtagcgtagatattaaaatttatcccgaatcacaaattgtcgacttcggtcaaatatctgatagtgttatattgaaagaaccagcaaagaaaccatttagcatatccactattaaaaatgaagctgcgggatgtaccgataaatttgatgtcaaaaccagtttttatactaatgatacgctatacgataatactcatctggatatgggaaatggtcttctgatgcgaattaacgacaaaacaattaacagcgatatcgtgtataaccaatatgcaaattttgcaagctatattccaggtagcgctgcaacggtaacccataactacattgctgagttgacgaagcatccaacaaaaagtcttgtggaagggcctttcagtaaagatttaatcataaaaataaactatcagtagaccaattttacccacacaacgaacagtatcctccgactatattggaggatactgtttatgagcgcaacaactgcaatcagctggctttacgctcgtgttcgcgacggtaggccactaaatcttcaatcgtgaccacttccatattgtgctgctgagcaaactcaatgcactgcggcgcacgcgccatagagccgtcgtcgttggtcagttcacacagtacgcccgccggtttgaggccagccagggtgaccagatcgatggttgcttcagtatggccgccgcgggtcagaaccccgcccggctgcgcgcgcagcgggaaaacgtgtccagggcggttcaggtcggacggcttcgcgccatcggcaattgccgcgcgcacggtggtcacgcggtcagcggcggaaacgccggtggtcacgccttcagcggcttcgatggtcacggtaaaaccggtaccgtaggcgctggtgttgttctcaaccatcattggcaggtcgagctgtttacggcgatcttccgtcaggcacaggcagacaatgccgctgccgtggcgaatggtcagcgccatctgctcaacggtcatggtttcagcggcgaaaatcatatcgccttcgttttcacggtcttcatcgtcaagcaccatcacaccgcggccttcgcgcagtgcatccagagcacgttctacacgttcaaaagcggtaccaaaagaggaaagtagcgtctgattcatggtaaaaaaaacctcattaattgtatggttaccagaatcagggcagtcttaggagcgccggtttagcggcaaaagtcaacgcaagcgggtacaaacccggctgagccgttactctctcccatccggactctaaccgtcggccccggaattacaccggatctgctgacctttctgcatttgcagaaagcgctcgcgggctttcaacgctatggttgatttaccgccggtggggaatttcgccccgccctgagaataagcaaagcaactataacgctattgactatcgtcggcaatgcataagcttcaaacatttatggtttataggcgccgacgatcgcactacaatgagcggataaccgaccagagcaggaaaccaccatgattgacccgaaaaaaattgaacaaatcgcccgtcaggttcatgaatcaatgccgaaggggctccgcgatctgggggaagacgtggagaaaaaaatccgtcaggtgctccagtcgcagttaactcgcctggacctggtaagccgcgaagagttcgacgtgcagacgcaggtgctgttgcgcacgcgtgaaaagctggcgcttctggagcagcgtcttaacgatctggaaaaccgttcgccgagcgcgccggcagcgccggacgtcgaagagaagccgtaaaacaagcaacgggccgtcaggcccgttgtcgtatctgtactgcggtaagtagattagtgctccagctccgcttctggcgacatggttttattcgcctggcggcagtaaagttcatagcgttgacaaaaccattcgcgatgcgcttcatccatattaccaacaatggcctgaagatcgacgggctgaccttgtgcgttcattctggcgaagctctgggccagaaaatcaaaattcttcattaaatacatatcgtttttcttcatacgcatactccttcagccgttggtcttctgattggtcatatgctttttactgacttcagtatttatccttaccttagctttttttgtacgaaaaatgcgcctcaaatggcgatttgttgagccaaatcatttatgccgtcattaaataaaaagaggcccgcgattaggcgatcgcgggcctcttttgtcctgttttgcagcgttatcgccggttacgcctcggttagcgcgataattccggacataccgccgctacggtgcgaagagaaaacattactgtttgttatctttctggatcttcttgatgatgttggtcgtcgagcagccatcttcaaagttgagcaccagcacctcgccgccgtttgcccagacttcttcgctaccggcgatctgttccggcttatagtcgccgccttttaccagcagatccggcagaattccggcaatcagccgctgcggggtatcctcttcaaaagagaccacccaatcgacggcttccagcgcgcccagcacgatcatccgctgatccagcgggttgaccgggcgagagtcgcctttcagacgccgggttgacgcgtcgctgttcaccgcaacgatcagccgatcgcccagcttgcgggcgttagccaggtaggaaacatggcccgcgtgtaaaatgtcgaacacgccgttggtcatcaccactttctcgccgcgcttacgcgccgcggcaaccgccagcttcagctcttcttcgctcatcacgccaaaaccggtctcggaacgcccgcgtaccgcgttctccagttcgataggcgaaacggtagaggtaccgagtttgcccaccacgacgcccgccgccgcgttggcaaagtagcaggcctcttccagagtgttgccggaggccagcgtcgccgccagcacgccaatgaccgtgtcgcccgcgccggtaacatcatagacttcctgggcctgagtgggcatatgcagcggcggtcgccccggctgcagcagcgtcatcccctgctcggaacgggtcaccagcagcgccgagaggtcaaaatcggcgatgattttcatcccgcgctcaacgatctcttcttcatccttacatttacccgcgaccgcctcaaactctgagagattaggcgtcagcagggtggcgccgcgatagcgttcaaaatccgtgcccttcgggtcgataagcaccggaacgcccgcgtcgcgagccagcttaatcatggtctggacgctggtcagagcgcctttggcgtaatcagacagcaccagcgcgccaatggagctcagcgcctgctgaatacgctcgtgcatcggctgaggatcgacgccggagaaaccctcttcaaaatcgagacgaatcagctgctggttgcgcgacagcacgcgcagtttggtaatcgtcggatgggtcgggacggacacaaagtcgcacttcacgttgacgtcggccagcgccttgcttaacgcgcgggcggcatcgtcaatcccggtcaggccaaccagacgagaggtcgcgccgagcgacgcaatattcatcgccacgtttgccgcgccgccaggacgttcttcgatattttccaccttcaccaccggcaccggcgcttccggcgaaatacggctggtgggaccataccagtagcggtccagcatcacatcgccaaccaccaacactcctgcacgttcaaactctggcagcgttactttcattcctctctcctgcgagacgcaaactttgcgcgcgataatagcacacccggttttttagttaagccatcaaccacttctgccagctggcgctgacctgttcacgctcctggctaaacgcttctggcgccacgttccccggctgctcctgcagcgccaggtgatggagcgcatcgcgcagcgtggtgtaagcgtgagttaacgccctcgcctctgcctcgtccataatgtcgttctgcgccagcagttccagaatacggacgttatcggaccagcgcgtgagcttcggtttatcactggcatagcgtaggaccagatactgggtaataaattcaatatccgtgatacccccggcatcggctttaatatcaaagcgatcgtgatgcttattccccaggtgagcgcgcattttttcacgcatttcccgcacttcggtctgcagtttttcgccttctcgcggggtagtaagaatatcccgacgaatggcgtcaaagcgcgcctgtagctcaggatcgccatacactacgcgggcgcgaaccagcgcctgatgctcccaggtccatgcctcattttgttgataatcagcaaaggcatcggcggtggtcaccagcatgcccgccgcgccagaaggacgtaagcgagcgtccacttcgtacagaatgcccgacgaggtgcgagtgctgaaaagatgcatgatgcgctgcgccagccgcagataaaactgacgaccgtcgatttcgcgctcgccgtcggtcatcacctccatcggacaatcgtggaggaacaccagatcgagatcggaactgtagcccagctcccagccccccagcttaccgtagccaaccaccgcaaaaccgcgcccctggcgatcgtgcaggtgcgtcggctgcccgtagcgggccaccatctgcagccaggcctgctggaccaccgcgtcaatcatcgcctccgccagccaggttaagtgatcgctcactttcatcaccggcagggttccggcgatatcggccgcggcgatatgcagcagctgcgcctgcttaaactggcgtagcgcctccagctgctgctcttcatcatcttccggtacgcgcagcagatactggcgcagctcatcgcgataggcatcggtggccgtcggctgataaagcgtattcgggtccagcagctcgtccagcagcagcggatggcgagccagctggctggcgaccatcggcgacgccgcgcacaggctaatcaggtgctttaacgcgccggggaattcgctcagcagctccagataggttgtgcgggtgacaatcccggtgagcagcggcgtaatgcgcgccagcggcaccggggcatccgcgcgcgagcagatttcgctgagcagatgcggcatgagctggtcgagcacctgacggccgcgcgggccaatcgtgcgccggtccagctctttacgaaaatcggcgatcagcgccagcacgctgcggcgatcgctgtcggcgagatgcgccagcgccgggctggtatcatcctcctgcagcgcgtcctgccacagttcgcgccagtactcttcaagctgttcatccggcgactgggtttcatcgtcgccgatcaattcattaaacacgcgccgcacgttggccatctgctccgccagccgcgcgctgagcgtatcccagtcggcagcccccatcccccaggccagccgggcgcgattaagttcatcctgcggcagggtttgcgtctgctcgtcgttgatgctttgcagcaggttttccaggcgacgcaaaaacagataggcttcgcgcagcctctgcgcatccccttccggcagcaggtgcagctcttcgatggcggccagcgtcggcagcaaagcccgctgttgcagcatcggttcgcgtccgccgcgaatcagctggaagacctggacgataaactccacttcgcggatgccgcccgcgccgagcttgatattgtccttcagtccccgacggcgcacctcacgggcgatcattcccttcatgttgcgcagagactgaatcacgctgaaatcaatatagcggcggaagacaaacggccgcagcatggcgcgcagttcgctggcgtaaacgccatcgttatcgcccatgattcgcgctttcaccatcgcgtagcgctcccagtcgcgcccctgctcctggtaataatcctccagcgcggcaaagctcagcaccagcgggccgctgtcgccaaacgggcgcaggcgcatatccacgcggtagacaaagccatcctgggtgggctgatccagcaccttaatcaggcgctgcccgaggcgggtaaaaaactgggcgttgtccagctcgcgacggccgccgcgcgtggcgccatgctccggccaggcgaaaatcagatcgatgtcggaggagaaattcagctcgccgccgccgagcttgcccatcccgaggatcagcagcggctgcggcgtaccttcagcattacacggagtgccccattcacggcagcaggcggcgtatagccagtcgcgcgcagcgacgattaaggtctccgccagcgcgcttagctgctgcaggctgctctcttcgctgaccagcgatagcgcctgggcccaggcgatacgcaccatgatccgacggcgaaactggcgtagctcgcgcatcagcgcggcttcatcattgacctcggccaggcgaacctgcagccagtcggcatagtgatgccactcctgcgcctcgggaggcgcactttcaagctccgccagccactgcggctgcgcgatcagactctgttcgacgaaatcgctaaaggccatgaccgattgcgcccgatcgctcaacgtcgatacgggaaaatccgctggtagccggcctgcgaccgtctgccagtgctgctgtaattgcgaagaaagcggcatcttaggggctccctggcctgaaattatcgttttccactatgcagccagaacggctccgcggccagcgcctggcgacgaaaatattcgataacgctgctgtcgttatgcgcaatcgcccggcgggtttcttgccagttttccagccacggcgcggcagcgtcgatataagcgccggatagcagctgaacggtgtcaatttcacgggtcaggcgcggaagctgatcgacataaccgtcagcggacggctggcggaaggcgtttttcagctccgccgccgctctggagagctgaatatccgcgaagcgtttaaacgaaccggcaattttctgctctccggctgcgttcaggaagggacgccagccgcggtttatcagcagatcggtgagcgtcagcttggctctgacggtcgccacgctgaaaagcgccgcctgggcggtttcggcctccgccagcgccgcctcagcttcgctcagacgctcacgcagcagcgtggtggccttgcgcgggacaataccgccaaacagcaccagcgcgtgccgcacgcgggcaatagcgtgcaaaatctctgctttcgcttttgcattgccgcgattgaggagttcatcatgatacagccagtgcgccagcgcgctttccagcgccgcttccagaccctgctcgacgctggccttcggcgcgacgcgaaggatcgttaacgcggtcagcggacgttcttcattgccctgcgccagatgataaccgcgcgccgccttgctcaggctgccctgacgcagtacgccggtatccagcaggcgacgggcaagggtcagaatgtcctgggtagtaccggacagcagttccagctccagttcacaaatcggttcctgatgctcgccggctttaacttcgccgcggtcaagcgcaatttcaatttcgctgtcgccttctttgaccacccatctttcacgctcaaaatcggtgctgaaaagcggctgtacgttctgtgcgagcgccgccggcagttccccctgcggccagacctcagccggcagtttctccagcgccagctccggcgtgtccagaggaatgttgtattccggacgctgatgcaggccgccgacgacgcgcccggcaattttcagcgtcatttcatagcgcccctggtcgccgcgaatgcgcagccccatgtcgtggcggcgcagccagttatccgccgtttcatagtaaatattcagcaattgacccgctggcgtatgctttgcctccagcgcgttgaggtgctgacgcagcgcgtcaacgccatcctgagcgacgataaactttaattcgatttcttgagccatgactgaattcttccgcttatatgctgtgccgggaaattgcggcgaactaacaacgatatttcttgtcagtaaatagtattttgcggcgaatcgccatgcaatgcgcattttgccgggccacctcctggatgattccgattgtggcggaaaactttgcgtcgcttcggcgatgccactactatcgttcaactttttatgaccaaacgatgacctgatgccaaaattacgccttattacattgactttgctggcgctgagcgccgccacggcggttcacgcggaagaaaaacgttacgtttcagatgaactgaatacctgggtgcgcagcggtccgggcgataactatcgtctcgtgggcaccatcaacgccggtgaagaagtcgcggtgctgcaaaccaacgacagcacgaactatgctcaggtacgcgacaacagcggccgtaccgcctggatccccttgaaagagctgagcaacgagcccagcctgcgcacccgcgtgccggatctggaaaaccaggtcaaaaccctgaccgacaaactcaacaacatcgacaccacctggaatcagcgcacggcggacatgcagaagaaagtcgccggtagcgacgccgtgataaacggtctgaaagaagagaaccaaaagctgaaaaatgagctggttgtcgcgcagaaaaaggtaaacgccgcaaatctgcagcttgatgacaaacagcgcaccattatcatgcagtggtttatgtacggcggcggcgtgctgggcgtcggcctgatcctcggactggtgttgccgcacctggtaccgagccgcaaacgcaaagaccgctggatgaactaattcgtcttctctgccagacttacgtatcatcgtaagaaaataaagacgggagagtgaggcgtgaaggtttatctggtcggtggtgcagtacgagatgcgttattaaggctaccggttaaagacaaagattgggtcgtggttggcgccacgcctcagcaacttctcgacgcgggctaccagcaggtaggccgtgattttcccgtgttcctgcatccgcaaagccgcgaagagtatgcgctggcgcgcaccgagcgcaagtccggctccggctacaccggctttacctgctatgccgccgctgacgtcacccttgagcaagacctgctgcgccgcgatctgacgatcaacgcgctggcccaggacgccgacggccagattatcgatccctacggcggccaggctgatttacgccagcgcctgctgcgccacgtctcgcccgcctttagcgaggacccgctacgcgtcctgcgcgtggcgcgttttgccgcccgctacgcgcatctggggttccgcatcgccgatgaaaccatggcgctgatgcgggcgatggccgatgctggcgagctggcgcacctcacgcccgagcgggtgtggaaagagacggaaagcgccctctctacccgcaatccgcaggtcttcttccagacattacgcgactgccgcgcgctcaaggtgctgttcccggaagtcgacgctctttatggcgtaccggccccggctaaatggcacccggaaatcgacactggcctgcatacgctgatgaccgtcaccatggcggcgatgctctcgcccgaagtggatgtccgttttgccaccctatgccacgacctcgggaaagggctaacgccgaaagcgctctggccgcgccatcatggtcacggtccggctggcgttaagctggtcgagcagctctgcgcccgtttgcgggtgccaaacgagctgcgcgacttggcaaaactggtcgccgaatttcacgatctgattcataccctgcccatcctgcagccgaaaacgctggtcaagctgttcgataatatcgacgcctggcgcaagccgcatcgtgtcaggcaaatcgcgttaaccagcgaggccgacgtgcgcgggcgcaccggctttgaagcctgcgattatccgcagggtcgcctgctgctggaagcctgggacgttgcccggtcggtttcaacaaaagaggtggtggcggaaggttttcagggcgttgaaattcgtgaagagctgacgcgtcggcggattcaggccgtcgcccgctggaaagaaaagcgttgccctcagccgcgggactgagggcggacgcttagaagaagaccacgtagaccgctgccgcaacgataaaacggtagatggcgaacgggataaacgaaatacgtttaatcagctgcaggaaggttttaatcgcaatcagcgcgacgataaacgccgtgataaaaccgacggcaaacatcggaatatcaccggcgttcaggaagccaatgctcttgtacatatccagtacggttgcgcccatcatcatcggcaccgccagcaggaacgagaactcagaggccgcatagcggctgacgcccatcagcatcccgccggaaatcgtcgccccggaacgcgagaagcccggccacagcgccagacactggaagcagccgatgacgaacgcctgacgataggtcatatcatcaatgcccaccgcgcggggctgttttggcttcagcacctccgccgcgatcagcagcacgccgccgacaatcagcgcgtacatcacgtttatcgggttaaacagcgatttgatggtatcgtggaaaatcagccccagcaccaccgccgggatcatccccaaaagaatatggataagcgacaggcgaccgctgccctggccttcatgctcgggctttttgccaaaatgaatgccgataagaccaaacaggcggcgccagaacatcaccacaacggccagaatggaaccaagctgaatgacgacttcaaacgtattcgcagtatcgccttcaaaacccagcagatgaccgacaataatcatatgaccagtactggagacaggtaaaaattctgtcaacccctcaaccacacccaatattgccgctatcagcagcgagtgtatatcgctcatccaattaaaccctttaaaaagtaaaatgaaaaaaaccaggaacgaagaaccgagctatcaggcgtgcttatttggccacagacagcgcgcagaaaagtgagcgtacaggttgtacgtaaggatttcgagcgctgtcacagggcaaaacggcaaagaaaatagcctgatggccggattctatgaccggtataaacgcaatttgtttaacgagtatgacctgaaaagttttgtttcagattaaggccacgttcaataatgacgccgacgttagccgcccgggctaccgccccaggtttgctgactttaatacgtacccatggagattgaaacttttccagcagcaggtcggcaatttcttccgccacgcgttccaccagcgcaaaacgcccgccttcgacgtggctgattaccagttcgctgatatcagcatagctgagacaatcgctgacatcatcgctggccgccgctttgcggttatcccacgccatttcgatatcgaacaccagcttctgttcgatggtctgttcccagtcgtaaacaccaattgtggtgattaccgaaagttgctctataaatacaatatccatcacgacctgcctgctttttggctaaaccggataccacttccggccaattatgcgtattatccacagatgcaaagacatcccctaaataatttgcgttgcaggaagacagtgacgcggcaaggctccaggagcatagcgtcgctatgggtcccggcgagccaatgcgcggacaacgcgcagtgcgcaggggataaaacgacactttcaaaatggaacagctgatgagtgcaatcgcgcctggactggttatcctcgcctacctctgcggctcaatctccagcgccattctcgtttgccgcctcgctggccttcccgaccctcgcgacagcggctccggcaatccaggggcgacgaacgtcctgcgaattggcggcaagggcgcagccgtagcggtgcttatttttgacgtcctgaaagggatgctgccggtctggggcgcgtgggcgttaggcctgacgccgttctggctcggcctggtggcgatcgccgcctgcgtgggccatatctggccggtattttttaactttcgcggcggtaaaggcgtggccaccgctttcggcgccattgctcctatcggctgggatctcaccggcgtgatggccggaacctggctgctgacgattctgctcagcggctactcctcgctgggggctatcgtgagcgcgctgattgcgccgttctatgtctggtggttcaaaccgcagtacactttcccggtttcgatgctgtcatgcctgattctgctgcgccatcacgacaacatacagcgtctgtggcgtcgtcaggaaacccgcatctggacccggctcaaaaagaagaaaaaaacgccggagcagaaataacctttgctgcgccgcaactcgcggcaagtgagtcccaggtgattaaggtgaaccaacgcggctgcggctcgaagtatgacgggcataagcttttcatatgaccgggatgattggcccccgatcaatactcttcgctgctgttttatcttgattttgcaggggcgcgacattgcacggcaccgtgttaccacagaataaaaaaggctggcaggcctcgctggacctccagtttcaatttctcggcgggaaaaccacgctcgcctcccgtcgtcatgtcggtcccctcaccgttcagcgcccgttttatcccgaagaagagacctgccacctctatctgcttcatccgcccggcggtatcgtcggcggcgatgagctcaccattagcgcgacgttggatcccgggtgccacacgctgatcaccatgcccggcgccagcaagttctatcgcagcagcggcgcgcaggcgcgtcttcagcaaaccctgacgctggccgaaaactcaacgctcgagtggctgccgcaggacgccatcttctttcccggcgccaacgccgctttgtctaccgtctttcatctctccgcctccagcacgctgctggcgtgggacctgctgtgccttggccggccggtcatcggcgaagcctttagccacggcgcgctcgccaatcgcctggaggtgtgggtcgacggctctccgctgctgattgagcgcctgagcctggccgatggacagctggcctgcgtcgcgcagcagccgtgggtgggaacgatgctgttctacccggcgaacgaaacgctgctcgaaggcgtacgcgaaaaacttacgccgctggcaaactacgccggcgcgacgctcaccgacggcctgctgacggtacgctttctaagtgacgataatctgctttgccagcgggcgatgcgcgatatctggcaatttatgcgcccgcacctgaccggcaaatctccggtactcccccgaatctggctgacttaagagaacgctatggaactgacacccagagaaaaagacaagctgttgctgtttaccgccgcgctggtggcggagcgtcgcctggcccgcggtctgaagctcaattatcccgaatccgtggccctgattagcgcctttattatggagggcgcgcgcgatggcagaagcgtcgccgagctgatggaagagggacgccacgtcctgagccgcgaccaggtcatggaaggcgtgccggaaatgatccccgatatccaggtcgaagccaccttcccggacggctcgaagctggttaccgtccataacccgataatctgaggtagcgcgatgatcccaggagaatatcaggtaaaacccggccagatagcgattaacgtcggccgcgccacctgctgcattatcgttgaaaatcacggcgaccggccgattcaggtcggctcgcattaccacttcgccgaggtcaacccggcgctgaagttcgatcgccagcaggcgaccggctatcgcctgaatatcgccgccggcaccgcagtgcgcttcgaaccgggccaaaagcgcgaggtggagctggtggcgctggccggaacccgcgcggtgtacggtttccgcggagacgttatgggcgcgctggaggcaaacgatgagtgacatttcacgtcaggcctatgccgacatgttcggccccaccaccggcgataaagttcgcctggcggacaccgagctgtggatcgaggtcgaagatgatttgaccacctacggcgaagaggtcaaattcggcggtggcaaagtgatccgcgacggtatgggccagggacagatgctttccgccgggtgcgtggatctggtgctgaccaatgccctgatcgtcgattactgggggatcgtcaaagccgatatcggcgtcaaagacgggcggatcttcgcgatcggcaaagccggcaacccggatattcagccaaacgtcacgatcgcgatcggcgcggccacggaaattattgcggcggaaggcaagatcgtcaccgccggcggcgtcgatacgcatattcactggatctgtccgcagcaggcggaagaggcgctggtctccggcgtcaccaccatgatcggcggcgggaccggcccggcggcgggcaccaacgccacgacctgcacgcccgggccgtggtacatctcgcggatgctgcaggccgcggacagcctgccggtcaatattggcctgctgggtaaaggcaatggttcgaatccggatgcgctgcgtgagcaggtcgcggccggggttatcggcctgaaaattcacgaagactggggcgcgaccccggcggcaatcgactgcgcgctgacggtggccgacgaaatggacgtacaggtcgctctgcacagcgacaccctcaatgagtccggattcgttgaggataccctggcggccatcggcgggcgcactatccatactttccataccgaaggggcgggcggcggccatgcgccggatattattaccgcctgcgcgcaccccaatattctgccctcgtcgaccaacccgacgctgccctataccgtcaacaccattgacgaacatctggatatgctgatggtttgccatcatctcgacccggatatcgccgaggacgtggcgtttgccgaatcgcgcattcggcgggaaaccattgccgcggaagacgtcctgcacgatctgggcgccttctccctcacctcgtctgattcgcaggcgatgggccgcgtcggcgaagtggtgttgcgcacctggcaggtggcgcaccggatgaaggtccagcgcggcccgctggcggaagagagcggcgataacgacaacttccgtgtgaagcgctatatcgccaaatacaccattaatccggcgttaacccacggtatcgcccatgaagtcggttcgattgaagtggggaaactggcggatctggtgctgtggtccccggcgttcttcggcgtgaagccggcgacgatcgtcaaaggcggcatgatcgcgatggcgccgatgggcgacatcaacgcctctatcccgacgccgcagccggtgcactatcgcccgatgttcggcgcgctgggcagcgctcgccaccgctgccgtttgacctttctgtcgcaggcggcggcggaaaacggcgtcgctgaacggctgaacctgcacagcgcgacggcggtggttaaaggctgccgcacggtacaaaaaggcgatatgcaccacaacggcctgctgcccactattaccgtggattcgcaaacctacgaggtgcgcatcgacggcgaactgataaccagcgaaccggcggacgtgttaccgatggcgcaacgttatttcctgttttaaggagcgcaaatgctttatttgacccaacgggtggagaccccggcgcaggccacggccagcgttaccctgccgattgacgtgcgggtaaaaagccgcattaaagtcacgcttaacgatggccgtcaggcgggcctgctgctgccgcgcggtctgctgctgcgcggcggcgacattctcagtaacgaaaacggtagcgaattcattgaagtgatcgccgctgatgaagccgtttcggtcgtacgctgcgccgatccttttatgctggcgaaggcctgctatcaccttggcaatcgccacgtgccgctacagattatgcccggcgagctgcgctatcatcacgatcacgtcctggacgatatgctgcgccagtttggcctggccgtggatttcgcgcatctgccgtttgaaccggaagccggcgcctacgccagcgaatcgcacggccatcaccaccaccatcacgatcgtgagcacagccactaaatgccgacgccggaaaaacgtctgcgcttgatgcagcttgccagcagcagcctcccggttggcggctacagctggtcccaggggctggagtgggcggtggaagcgggctgggtagcggataccgccgcctttgagcgctggcagctgcgccaaatggagcagagcttttttaccgtcgacctgccgctgtttgcccgcctctaccgggcctgcgaagcgggcgatctggcctgcgcccggcgctggaccgcttatctgctcgcctgccgggaaactcgcgagctgcgcgatgaagagcgcaaccgcggcgcggccttcacccggctgctggccgactggcagccggactgcccgcccgagtggcgcaagctgtgccagcaaagtcagctaaccggcatggcgtggctcggcgtacgctggcaaatcgccattcctgacctggccctgagccttggctatagctggattgaaagcgcggtgatggcgggcgtcaagctggtgccctttggccagcaggcggcccagcagttgattcttcgcctgtgcgaccgctacgcggcggacatggacagcgccctggcgaccccggacgacgccatcggttcggcgacgccgcttgcggctatcgcttccgcccggcacgaaacccagtattcccgattattccgttcttaggagaaggtatgaacatgattaagcaaccgctgcgcgtcggcgtcggcggcccggtcggctccggaaaaaccgcgctgctggaagccctctgcaaagccatgcgcgacacctggcagctggcggtggtgaccaacgatatctacaccaaagaagatcagcgcattctcaccgaggctggcgccctggagcctgaacgcattgtcggcgtcgaaaccggcggctgcccgcataccgctattcgggaagatgcgtcgatgaaccttgccgcggtggaagcgctgagcgagaaattcggcaatctcgatctcatatttgtggaaagcggcggcgataacctgagcgccaccttcagcccggagctggcggatctcaccatctacgtcatcgacgtggcggaaggggaaaagatcccgcgcaaaggcggaccggggatcaccaaatccgacttcctggtgatcaacaaaaccgatcttgcaccgtacgtgggcgcgtctctggaagtgatggagcgcgataccctgcgcatgcgcggcgaacgcccgtggagcttcaccaacctgaaaagcggcgacggcctgcaaaatatcatcgcctttatcgaagacaaaggcatgctcggcaagtaacccctgcaccatcccggcgcagaggtgtcgggatggtgcataccctgccctctctttagccatccccttcatgaagccctgatagcgcctgccctgcgatgtggcataaggtttgctaattccagtcatgcctaaccattaaggaatgactatgtcatcactggatataaaaactgatttacctgcgcaaaccagtgcctccggctccaaagaaacgctggaagattatacccttcgctatgctccgctgagctttcgccgctggggaccgggggttgtcgcggtgaccgcattgggcggcatcgcctatctggctgacttttctatcggcgccagcatcggcatggcctggggcaccaccaatgcgatttacgcgatcctgctggcggcgctggttatttttcttaccggtattccgctggcgattaccgccgcgcgctataacatcgacctcgacctgatcacccgcagcgccggtttcggctactttggttcggtgatcaccagcattatcttcgccggatttacctttatcttcttcgcgcttgaaggctcgatcatggcgcaggggctgctggtgggcctggggatcccgctgtggatgggctacctcatcgccacgctgatggtcttgccgctggtggtctacggcatgaaggcgctgactcgccttcaggtctggacgacgccgctgtggctggtcctgatggtggttccggtggtctggcttatcgccaaagacccggatctggtggacggctttatgaacttcgccggtaaaaacaacgcctcaacggtagatttaaccgccattatgctcggcgcgggggtgtgcctgtcgctgatcatgcagattggcgagcagatcgactacctgcgctttatgccgccgaagaccgcggaaaacagcaaaagctggtggctggcggtgttctccgccggcccgggctgggtcgtattaggcgcgattaaacagattatcggcgctttcctcggcttctatctgctgacccgcttcccggcggtgcacaacaccgaaccggtgcaacagttcgtcagcgtcttcgataacctggtccccggctggctggcgctcaccctcgcggtggtgctggtggttatctcgcagattaaaattaacgtcaccaacgcctattccggctcgctggcgtggaccagcgcctggacgcgcaccaccaaacgttatccggggcggattattttcgtcatcgtcaacctgacgattgcccttgccctgatggaaggcgatatgtttagcgctctggcgtggatcctcggcttctattctaactttgccatcgcctgggtggtggtggtcgccaccgacatcaccgtcaacaaaggggtgctgaagctggcgccggcgcagccggagtatcgccgcgggatgatctacaacgtcaacccggtaggcgtagtctcttttgccctagcggcaggcctttcgattagcgccttcttcggcctgctgggcgaaacgctggcgccgttctcgccgctgattgcgctggcggtggctttcgtgatgacgccggtcatggggatcgccacccgcgggcgctattacattaaacagcacgatgatggtattgccgagccgcgctacgatgcgcagggtaacgcgtcgatcaccgtttaccgctgcctgagctgccgggaagagtacgaacgtcctgacgtgatgcattcgcacaagcaccagggggcgatttgctcgctgtgtaagagtatggaataagtcgcgaaggcaggccgacaggacgtcggcctgtgaaatatcagacgttatgccgccggaagctcagccagcggccagcgcggacgaacggtgacaccgagctccgctttagcgccggagcgcagacggaccatccccgcataggcaatcatcgcgccgttatcggtacagaattcaggacgagcgtagaagacttcaccaccgcgctttttcatcatttccgccagcttcgcgcgcagcgtacggttagcgctgacgccccccgccatcaccagccgtttaaagccggtttgatccagcgcgcggcggcacttaatcatcagcgtatccacgaccgcatcttcgaaagcgcgggcgatatcggcgcgggtttgatcgtcatcgccgttgctgcgaatggtgttcgcggcaaaggtcttgaggccagaaaagctgaaatccagcccggggcggtcggtcatcgggcgcgggaagacaaagcgcccttcggtgccctgggaggccatcttcgacagcatcgggccgccgggataatccagccccagcagtttcgctgtcttatcgaaggcttcgcccgccgcgtcgtcaatcgattcgcccagcagttcatactggccaatgccggtgacgccgatcagctgggtatggccgccggaaaccagcagcgcgacaaaaggatactgcggcggattatcttccagcatcggcgccagcagatgcccttccatatggtgtaccgggatcgccggcacgttccaggcgaacgccagcgaacggccaaccgttgcgccgaccagcagcgcgcccaccaggccggggcccgccgtatacgcaacggcatcgatatcctttgccgtcagcccggcttccttgagcgccgcctgaatcagggggacggttttacgtacgtggtcgcgcgaggccagctcgggcaccacgccgccgtagtcagcgtgcaatttcacctgactatacagctggttggctaacagacctttttcgtcgtcataaatggcgatgccggtttcatcgcaggatgtttcaattcccagtacacgcatggctagttttacctcgtttcaataccgcgcagtgtaggaccaatgcgggttgatgtataccctaagaatttcaggtcgcgggaaggcggcgacgcagcgcatcccccggagcgtacggaaagtacgtgactggggtaagcgagaaaagccaacgctcctgcgggctgaaagacgacgggtataaaactttcctcacccctggcgttcacttcgtgtatactccctgtccttataaaagtccctttcaaaaatcgcgtcggtgctttacaaagcagcagcaattgcagtaaaattccgcaccattttgaaatatgctggcgctgatgccagcggcaaaccgaatttatcaaaggtgagagttacatgccggtaattaaagtacgtgaaaacgagccgttcgacgtagcgctgcgtcgcttcaaacgttcatgcgaaaaagcaggtgttctggcggaagttcgtcgtcgtgagttctatgaaaaaccgactaccgaacgtaaacgcgctaaagcttccgcagtgaaacgtcacgcgaagaaactggctcgcgaaaacgcacgccgcactcgtctgtactaatctgttgggagccacgctctcaattcagaccgagttgtagttgtaaggccgtgcttccgaaaggaatgcgcggcttattttcgtttatgcattagcatatacacccaatcattcaagatgcatcaaggcggcaagggagtgagtccccggagcttaccgaagtaagtgacaggggtgaacgagcgaagccagcgcagaggcagcttgaagggtaacgtgtataaaacggggcatatggctggacgaattccacgagtatttatcaatgacctgctggcgcgcaccgatatcgtcgatctgatcgatgcccgggtaaagctgaaaaagcagggcaaaaattttcacgcgtgctgtccgttccataacgaaaaaaccccctctttcaccgtcaacggtgaaaaacagttttaccactgcttcggctgcggtgcgcacggcaacgctatcgacttcctgatgaactacgacaagctcgagttcgtggaaaccgttgaagagctggctgccatgcataatctagacgtgccgtatgaagcaggtagcggacccagccagattgagcgccatcagcggcaaaatctctatcagctgatggatggtctgaacacgttttatcaacagtctctgatgcaacccgccgccggccccgcgcgccagtatctggaaaaacgcggcttaagcagcgaggtgattacgcgcttcgcgattggctacgcccctcccggttgggacaacgttttaaaacgttttggcggtaatcaagaaaaccgccagtcgctgattgatgcgggcatgctggtcactaacgatcaggggcgcagttacgaccgcttccgcgaacgggtgatgttccccatccgcgataagcgaggccgggtgattggttttggtggtcgcgtgctgggtgacgccatgccgaagtacctgaactccccggagaccgatattttccataaaggccgccagctgtacggtctttatgaagcgcagcaggataacgctgaaccgccccgcctgctggtggtcgaaggttatatggacgtggtggctctggcgcagttcggcattaactatgccgttgcatcgctggggacgtcgacgaccgctgaccatattcagctgttgttccgggtcaccaatcaggtggtttgctgctacgacggagaccgggccggccgcgatgccgcctggcgcgcgctggaaacggcgctgccgtatatgaccgacgggcgccagctgcgctttatgtttctgccggatggcgaagacccggatacgctggtgcgcaaagaagggaaagccgcatttgaagcgcggatggagcaggctcagccgctctccacgtttttgttcaacagcctgctaccgcaggtggatttgagcaccccggacggccgcgcgcagctgagtaccttagcgctgccgctgataacccaggtgccgggtgaaacgctgcgcatttacctgcgccaggagttaggcaataagctggggattttagatgatgcgcagcttgaacgtttaatgccaaaacagtctgaaaatggcatccagcgccctgctccgcagctaaaacgcacgaccatgcgtatactgatagggttactggtacaaaacccggatctggcgccgctggtaccgcccctggaagggctggacccgcgtaaaatgccggggcttgggctgttcaacgaactggttaaaacctgtttggcacagccgggcctgaccaccgggctgctgttagagcagtatcgcggcacaaatgaggccgcaacccttgaaaaactgtcgatgtgggacgatatagcagataaggatattgctgaaaaaaccttcaccgactcgctcaaccatatgtttgattcactgctggagctgcggcaagaagagttgatagctcgcgaccgcacgcacggcttaagcagtgaagagcgccgggaactctggaccatcagccaggaactggccaaaaaataaacgaaagacgaactcattcaagttgtatcaaagcagcaagagaacgaatccccgggagtgcgcacaagcacatgaccaggatgagagaacgtagctaacgcagagacaacttgaaagataacgcattgaacggcttaagtgccgaatatcgttcgggaagaccccgacagccgctcgaggcgcagcggcaataatataagtacgccctcgctttaaatgttggcagttcgcctgcttacaccaatcaaacgaattaagtgtggataccgtcttatggagcaaaacccgcagtcacagctgaagcttcttgtccaacgtggtaaggagcaaggctatctgacctatgccgaggtcaatgaccatctgccggaagatatcgtcgactccgaccagatcgaagacatcatccaaatgatcaacgacatgggcattcaggtgatggaagaagcaccggatgccgatgatcttttgcttgctgaaacgaacaacaatactgacgaagatgcggaagaagctgcggcgcaggttctctccagcgttgagtctgaaatcggacgcacaaccgacccggtgcgcatgtacatgcgtgaaatgggtaccgtcgaactgctgacgcgcgaaggcgaaatcgacatcgctaaacgtatcgaagacggtattaaccaggttcagtgctcggtggctgaataccctgaagcgatcacctatctgctggagcagtacgatcgcgttgaagcggaagaagcgcgtctgtccgatctgatcaccggttttgtcgacccgaacgccgaagaagatatggcgccaacggcgacgcacgtcggttctgaactctctcaggaagagatggatgacgacgaagacgaagatgaagaagaagacgacgacagcagcgatgacgacaacagcatcgaccccgagctggcgcgcgagaaattcgccgagctgcgtacgcagtacgaactgacccgcgacaccatcaaagcgaaaggtcgtagccacgccgcagcgcaggaagagatcctcaagctgtccgaagtgttcaaacagttccgtctggtaccgaagcagttcgattacctggttaacagcatgcgtatcatgatggatcgcgttcgtactcaagaacgtatcatcatgaagctgtgcgttgagcagtgcaaaatgccgaagaaaaacttcatcactctgttcaccggcaacgaaaccagcgaaacctggttcaatgcggccatcgccatgaacaagccgtggtcagagaagctgcttgacgtgaaagaagacgttcagcgcggcctgatgaaactgcagcagattgaacaagagaccggcctgaccatcgagcaggtaaaagatatcaaccgtcgtatgtccatcggtgaagcgaaagcgcgccgtgcgaagaaagagatggttgaagcgaacctgcgtctggttatctcgatcgccaagaaatacaccaaccgcggtctgcagttcctcgatctgatccaggaaggcaacatcggtctgatgaaggcggttgataagtttgaataccgccgcggctacaagttctccacctacgcaacctggtggatccgtcaggcgatcacccgctctatcgcagaccaggcgcgcaccatccgtattccggtgcatatgattgagactatcaacaagctcaaccgtatttcccgccagatgctgcaggagatgggccgcgagccgacgccggaagagctggccgaacgcatgctgatgccggaagacaaaattcgtaaggtgctgaaaatcgccaaagagcctatctccatggaaacgccgattggcgacgatgaagattcgcatctgggagatttcatcgaggataacaccctcgagctgccgctggactctgccaccaccgagagcctgcgcgccgccacccacgacgttctggctggcctgaccgcccgtgaagcgaaagtcctgcgtatgcgctttggtatcgacatgaataccgatcacacgctggaagaagtgggtaaacagtttgacgtaacccgcgaacgtattcgtcagatcgaagcgaaggcgctgcgtaaactgcgccatccgagccgttctgaagtgctgcgtagcttcctcgacgattaattatcgccgcgtcccctgaaaagccagtcacatgactggctttttttatgcctaagcagaaaccatttatttaataaatattaaaaccccaatataaaacccatcaatatatatccaggtcttattcttattatttatttatgtgccattaaaccgctggactcatagttttacgattgtactattggttggttgatggagcgtatttacgcctaaaaccgcaggcaaatcatagggaaatgaaatgaatagcaagcgtaaaattcagctggctgattttaatagaacggttattttaaccaccgctaatacattatttctaagccgtggaatagaaagtaccaccatggatgagatcgcacatgaagccggttttagtaaaaccacgctttatacctatttcgacaataaaaaggatattctggatcatcttatcctggaggtaatggcgcgtttctatcaggagctcataccaatcgccaataggcaaaattcatttcgcgaattttatcgcgagctgtgccatgcgctgatggctctccacgaaacaagccttgcctacttttccgcgatagccgggaagatcgcctgttctgaaaaaatcactaaaaacaataaagcgttgaaaaatatcgctatgactggagaacagatccaccagattatcgcaaagcgaatcacagacgccgccgaaaaaaaagagattggattaagtgctcccgtcgcggacgtcatgatgctgttctggctctgcctgaccgggctagtggaaaagtcctcgtacagagaagaatgtcttttacgtcgccttgagaaagaccgtaaagcctttctcgacttcgcttttgacgccctcttattcatgatagaaaaagggaatattagcgattgcgaaaaagctgactaaagcctcaggcttaagccagccgccgacgaccggggtgaaagccgtaacccctttgtcgtcggaaatgcattaaagccctcgcgtggccagcgcctcgtcaagctcccggtaggcctccaccagtttatccagcgtcgcccggttgaggccactgggattcggcagcacccacacttccgtcgccccaatggtcacctgctgcttgccccattttacgccgcgcacctgaaacgctttctcgaaggcctgtttacccaggatcgccagcgcgcgcggctgatactcttccatttttctgaccagttcacggccaccatcgcggagctccagcagctcaacctcgctggcctgcaccgtcgggcgttcgacgagcatcgtgatcccgcagcgggtatccagcagctggagttcctcctcgggtttcagaagacggtcggtaaagccggcctggtgaatcactttccagaagcgattgcccggatgggcgaaatgaaaaccggtatgggcggaagacttccccggattgataccgcaaaagaccacccgcaggtccggcgccagaatatcgttgatcatgttttccccagctcaatgcctaaaaggtaattataaaggattgaaaatgcgttgtttataaaaacagcaggcgtgatttttaggctggattgcggggaacagttactttataatccctcgccacggccccttagctcagtggttagagcaggcgactcataatcgcttggtcgctggttcaagtccagcaggggccaccagatacagcagggctgacgaaaaatcgtcagcccttttgcattgtgcggccccctcggggcgccgcagcttaacgtgaggttcgcgacaggcggcttacaccagcgcctgcagctgttcgcgcatatagacggtgaagaattccgggtttttaatgacgatccggttaccggaggcaattttttccgcccagccggccactttttccgtgaacccggcatcccatccctccttttcaccccgggccatgacgtcggcaggatttgccggtacgcccagttcatgcaaatacttcaaaattcccttagcggtactttcatccatagtattcggcaccgacaacgatgtgttcataccaccaataaaatccagggctttatcgattgctgttggcatactcttatccttaaaattaaccacgtaatgaacatgatgacactatggacccatcttcgccgggatatcaaagagatcgttgcctttctttgattcagaccgcagctaaacgcttgcgtggtgcttttctgctcgactatttcgtaccattcctcacaggaaactactccatacgtccgcgcttaaactggccggcatcgatatcgtactgtttcatttttcgccacagcgtggtgcggccaatattcagcagctgcgccatctcctgcacccgtccgctggtcacccgggcggcatggataatcgcttctttctcaatggcgctaaaggtcaggctggcgggcagcagcgaggagcccgcgtcggcgccgggccgctcggcaaacagatattccggcaaattactcagccggatatggccgttatcgctgctaatggcgatattttcaatcacgctgttcagctcaaaatcgttgcccggccaggagtaggccaccagctgcgccagcgcatcgtcatccattttcagccgcgaggaaaagcgcttttccaggctcttaaggcgattgtgcaccagcgaaggaatactgttacgccgcgcgcgcagcggtgggataacgatttcaaaggagtgcagcgcgtagtaaagctggcggctaaagcggttttgctccaccagattggcaagatcgacggtggtggtggcgatcactttaacgtctaccggaatcaagcggcgggcatccagacgggttaaaaccccctgcttgatcacctgcagcagcgcggactgcagctccggcgccaggtattcgattttttccagaaacagcgtcccgccgttggccagctcaagacggctaaggcggccgttttcatcgtccgtcggcgcgctgcccataaaatcctggcccaggacgctgtcggcatacagctgacagttgaccgcgatatacggcccgccgccccgctcgctctcattgtgaatcgcctggctgagcaactccttacccaccccctcttcaccgcacagcagcaccgggaaagcgccgcgcgccgcctggcggccaaagtgaatcagccgccgggtttccgggtcgtccgccgacatctgttcaaaggtatggctcactttgccaagctggctggtcatcagctggcgcatctgctcgaccggatgcagcagcagaatgaaactgttgccctgctcttcaacgattggcttgagcgtaatcacggcgtcgacaaactgatgctggctttcgaaggtgacctccacatggttcagcccgcgcgcgtgcttaatggcacgacgcagcagggccggcagcgtcaccagttcattgatgtttttcccctggctggcctgggcatcaaggtgcagcagcgtcgcggcctgcacgttcagaaactgcaaaatcccctgctcgttccacgccatcaccccgtcatccatgctctccagcagaccgtacatctggttaagatggcgattcgactcggccagcaggctatcagtgagcagcgagttgccgacttcccgggcgatagccagggtcagggagaggtcaggcgaagcctgttcttccgtcagacagcacagggaaatggaaccgaacagacgcccgtggttatcaaacaccggcgtggagctaaacgaccatccgtgcagcgcatgtttaaaatgctcctcgcccgtcgttttgactggctgcccgagcatggaggccagcgaaagcgcgcagctgccgataatgctttccgcgcagtagctgccgtcacgaaatcccagcgccgccagctggtcgagggtctgcggatcgccgcagcggctaagaatacaggcggactcatcgaggatgaacagcgcgcaggggcggttatccataaactcccaggcatcctccagcgccgcctgaccaatcgtcaacagcgcggtcttgcgccgacaaatcgattcaaacgtcagcccctgcgcctgatgcggcgtctgccaggtttcccgctgcataaacttgctgcagcgatgccacgactgggttatcaccaaaggaaagctctgagtctgcgcagtcatatccctatccgctgtttcataaacgacaacccctccggcggctaccgccagagggggagaaaacgtctcatcgctaaaatgagacggggcagatcgacgctaaattagcgcgccagccactgctgtccgagcaggtcggcggtcagaatcgccgcatgcacgctctgcgcgctgaccgggaacggcatgttatgaatggtttcaccttccgcgcaggtcgctttggcgactgcctgaattttctcatcgatgccctctttaacgcccatttgcgccagcgtaaccggcagcccgacggtatggcagaagttcagcaccgtttcgatctcttccatcgggctattttgcagcaccagctgcgccagggtaccaaacgccactttctcaccatggtacagatggtggcactcttcgaggatggtgaaaccgttgtgaatggcgtgcgcggcggccagaccgctactttcaaagccgataccgctgaggtaggtattcgcttcaacgatacgttccagcgcatcggtcaccacgccggcctgggcggcgaggcgggctttttcgccttccgccagcagcgtatcatagcacaggcgcgccaggctcagcgccgctgccgtcgactgaccgcccgccatgctggtggctctggcgtcatagcaggccctggcttcaaaccaggttgaaagcgcatcccccatcccggctaccagcaggcgcaccggcgctttagcgataatcgccgtatccatcaccaccatgtccgggtttttcgggtagatcagatactcttcaaattcgccggcttcggtgtagataaccgacagcgcgctggttggcgcatcggtggaagcgatcgtcgggatcaccaccaccggtagcttctggtagtagccaatggctttcgccgtatcgagcgtcttgccgccgccgatgcccaccacgccgcggcagccgtgctgtttcagaatggcgatcaggcgattgatctcaacgtggctgcattcgccgttgaagcgctccgcatggcagctgatattatggctgtgcaaaccttccagcactttctctcccgccagcttcatcacgaagtcatcggcaatcacgaaaaagctgtccgccaggtttttggcgtattgcccaaacagcgtggatgcatctggtccctggagatatttggctggagattgaataacttttagcattccgttcaccctcaaataagtgcatgttttgacatgatgagccccggtgtttctccgtccggccttacatcaaaggcggggacgaaagcgctacctgagcgatgccatcactgtagggcgagccgcgggcaaaaaaatctttcccctttttgtcccgatatgaaacaggacataaattttattgtttcatattgaaacatgaattcatgtgaaacgatgggattgcgatctcgatccgcccctttggcgcaaaagaaggtcaccaaccggacgatcgtcgacgtttttcaccaccacgggcggcaagaaggggcaaaattatttctctgagcgggctttccacgctgatgaagcgaggtgaaagaggcgccttacttcgcatttttccctttccttgcgcaaaaatgtttcattaaggaacaaaaattaataattacgtttcgtaatgaaactcattttatggcgattttttttcccgccaactcagccagaatcaatacatcgcccgatatcgcatatcgtcaggcggtacccctacacgatgaccgcctccgtcagcagagaggccgcatcgaaactccgacggagcataaacaatgaaaaaactgattaaccgtgtcgaagatgtcctgagtgaacaactggctggcctggcaaaagcccaccctgaactgacgctacaccaggatccggtctacgtcacccgcgccgatgcgccggtggccgggaaagtggcgctgctctccggcggcggcagcggccacgagccgatgcactgcggctatattggccagggcatgctttccggggcctgcccgggagaaattttcacctccccgacgccggataaaatgtttgagtgcgccatgaccatcgacggcggcgaaggcgtgctgctgattatcaaaaactacaccggcgatattcttaacttcgaaaccgccaccgagttgctgcacgaaagcggcgtcaaggttaccaccgtggtagtcgatgacgacgtggcggtgaaggacagcctctataccgccgggcggcgcggcgtggcgaataccgtgctgattgaaaaactggtgggcgcggccgccgaacgcggcgactcgctggaagcctgcgccgaactggggcgcaagctcaacaacctcggccactctatcggcatcgcgctcggcgcctgcaccgttccggccgccgggcaaccctcattcgaactgcaggacgatgagatggagttcggcgtcggcattcacggcgaaccgggcatcgaccgccgccgcttcacctctctcgatcgcaccgttgacgaaatgttcgataccctgctggaaaacggcgcctatagccgcacgctgcgccactgggacaacgtgaaaggcgcgtggcaggaggtcacgcagaccaagcaggcgctgcaaaaaggcgatcgggttatcgcgctggtcaacaacctcggcgccacgccgctgtccgaactctacggcgtctataaccgtctgacgcagcgctgcgaggaggccggtatcgttatcgcgcgcaaccttatcggcagctactgtacctctctggatatggtgggcttttccatcaccctgctaaaggccgatgaagagacgctggcattatgggacgccccggtccacaccccggcgctgaactggggcaaataaggagcaacgacatgtcattaagcagaacgcaaatcgtagactggctctatcgctgcggcgatatcttcaccaaagagagcgattttttgaccggtctggaccgggaaatcggcgatgccgaccacggcctgaatatgcatcgcggttttagcaaggtggtagaaaagctgccgtcgattgccgataaagacattggttttattcttaaaaataccggtatgacgctgctctccaacgtcggcggggccagcggcccgctgttcggcaccttctttattcgcgccgctcaggtgacccaggcccaccagagcctgaccctggaggagctctatcagacctttcgcgaaggcgcggaaggggtggtgaatcgcggcaaagccgagcctggcgataaaaccatgtgcgacgtctggctgccggtggtggaatcgttgcgccagtccagcgaacagcacctgtcgataccaggcgcccttgatgctgcctgcgaacaggcgcaagccgccgtccacgccacaatcgccatgcaggctcgcaaagggcgggccagctacctgggcgaacgcagcatcgggcaccaggatccgggcgcgacctcggtgatgttgatggttcagatgctggccgcagcggccaaagagtaaggaaaacgcgatggtaaacctggttattgtttctcatagcgcccgtctgggcgaaggtgtcggagaactggcccggcagatgttaatgaacgatggctgtaagctggcgatcgccgccggaattgacgatcccgccagtccgatcggcaccgatcccattaaggttatggaagctatcgagtccgtcgccgacgccgatcatatcctggtgatgatggatatcggcagcgccctgctgagcgccgaaaccgcgctggatctcctcgatccggccattgcggctaaggttcgcctgtgcgcggcgccgctggtagaagggactctggcggcgacggtgagcgccgccgccggagccggcatcgacaaggtgatcgaagacgccatgaacgcgctggaggcaaaacgcgtacagctggggttaccatcgcaaccgcaacacgcttcgctgaccgccgcgccggtcgacgaccgcgacgcgcgctcggtttccgtggtgattcaaaaccacaacggactgcacgttcgcccggcgtcaaagctggtcgccgcgctggcgggattcaatgccgacctggtgctggagaaagggggtaaatgcgtcacgccggacagcctcaaccaaatcgccctgcttcaggtgcgccgaaacgataccttaaggctgcttgcccgcggcccggacgccgacgccgcgctggcggcgttccaggcgctggcggcggagaacttcggcgagccaacggaggcggcgcccgcgcgtcggcccgccagcgccgaccgcgttgagggtaaggtcgtgctttatccccagccgcaggacaggatctcgcgggaaacgagcgccgccatcggccagcagcagctgcggctgaaacgggccatcgaccggacgctggaagaccttagcgcgctgacgactctggcagaggcgacgttttccgccgacatcgcggcgatcttctccgggcatcataccctgctcgatgaccctgatttatacgcagcggcgtgcgacatcatacgcgacgagcagtgcagcgcggcgtgggcctggcaacaggtgctgagcgatttaagccaacaatatcgccatctcgacgatgcttacctgcaggcgcgctatattgatattgaagatattttgcaccgcacgctgcgtcaccttaacgagcgcaatgaagcgctgccgcagtttagcgcgccttcgatcctcgttgccgacgatatcttcccttctaccgtcctgcagcttaacgcagagcaggtgaaggggatctgcctgcaggccggcagcgagctctctcacggcgccattatcgcccgccaggcaggtattgcgatgctgtgccagcagagcgatgccctgacgctgcaagatggcgagaacgtcatccttgatattcccggcaaacgcgtgattcgcggctaacctgccctaacctttccgccccggaggctgtcccctccgggaactcgcttaactttcaggatccgttatgtctcaattcttttttaatcagcgcgccaacctcgtcaacgaagtgattgaagggaccattatcgccagcccgtggaacaacctggcgcggctggagagcgatcccgccattcgcgtggtggtgcgtcgcgatctcgacaaaaacaacgtggcggtaatctccggcggcggttccggtcacgaaccggcccacgcgggctttgtcggtaaaggcatgctgaccgccgccgtctgcggcgatctgtttgcctcgccgagcgtcgatgcggtgctgaccgccatccaggccgtgaccggcgatgccggatgcctgctgatcgtcaagaactacaccggcgatcgtctgaacttcggcctcgccgcggagaaagcgcgccgtatgggctataacgtcgagatgctgatcgttggcgatgatatttcactgccggataacaaacatccgcgcggcattgccgggacgattctggtgcataaagtggccggctacttcgccgaacgcggccacaatctggcaaccgtgctgcgcgaagcgcagtatgccgccagacacaccttcagcctcggcctggccctttccagttgtcatctgccgcaggatgcggaaacgactccgcgccatcatccggaccaggccgagctggggatggggatccacggcgaaccgggcgcttcggttatcgctacgcagaacagcgcggaaatcgttacgctgatggtagagaagctcagcgccgccctgccggaaaccggccgcctggcggtgatgatcaataatctcggcggcgtgtcgattgccgaaatggcgattttgacccgcgagctggccaatactgcgctgcatcagcgtatcgactggctgataggtccggcgtcgctggtcaccgcgctggatatgaaaggcttctccctcaccgccatcgtgctggaagagagcattgagaaggcgctgctttccgcggtagaaaccgccggctggcagacgccggtacagccgcgcgcggtcagcgtgatgccatcatcgctgcgcagtacgcgggtggagtttgcgccctcggagaacagcgaagttgcgggctacgtggaacgggtgaccggcacgctgtccgggctggaagcagaccttaacgcgctggatgcgaaagtcggcgacggcgataccggctccaccttcgccgccggcgcgcgcgacatcgccgacttacttcagcgtcgtcagctgccgctggctaacctcgccacgctgtttgccctgattggcgagcgtctgacggttgtgatgggcggctccagcggcgtgctgatgtcgatttctttaccgccgccgggcagaagctggaacagggggcaagcgtcgccgaagcattaaacgccggtctggcgcagatgaagttttacggcggtgcggatgaaggcgaccggaccatgattgacgccctgcagccggcgctcacggcgctgctggccgaaccggataacctgcaggcggctttcgccgcggcccaggcgggcgcggatcgtacgcttcacgccagcaaagcgggcgccgggcgcgcatcgtatctgaacagcgatagcctgcgcggcaatatggaccccggcgcccacgcggtggccatggtatttaaagcgctggcgcagaaatagtctcccctgctcgcgctgcgcttagcagggctacaggtcaccctcgtctgcgggctagtcgcccggacagatgcgcagcatcgcctccgggaaaatcagccactctgcgcgctgctcccgggggcggcgcttaacgcgccttgcccgggctacgagttccccctcgtctgcggaccggtcgcccgggcagatgcgcagcatcgcctccggaaaattcagctactctgcgcgctgctcccgggggcggcccttaacgcgccttgcccgggctacgggttcaccaccacctgcgggtctggtagcccggacagatgcgcagcatcgcctccgggaaaatcggccactctgcgctctgctcccgggggcggcgcttaacgcgccttgcccgggctacgggttccccctcgtctgcggaccggtcgcccgggcagatgcgcagcatcgcctccgggaaattcagctactctgcgctctgctcccgggggcggcgcttaacgcgccttgcccgggctacgggttccccctcgtctgcggaccggtcgcccgggcagatgcacagcatcgcctccggaaaattcagctactctgcgctctgctcccgggggcggcgcttaacgcgccttgcccgggctgcgggttaacagccgtctgcggtccggtagcccgggtaaggcgccagccgcaacccggggtttctccgcgcttatttgctgtgccagtaggcctgcgaacgcaccagctgcggatcaatctccgggccttcaaagcgcgccagcagcgatttcaccaccgccccttccccggtcagccagataaaataatcctcagccggcaccgctattcgcgccaggcgctcggccgcggcagtggagtgatgtcccaccacccactcgatatgaaaaccatcgagatcggccaggtaatcttgataagactcatcgccaatggtgacgatcgccgtgacctgcgggcgcgtcggaagctgctgcaatcccagcagacggcggcgcagcgcgggcatgcctgactcatcggtcacatacagctgccaggcgtaatcttccggcaccaccagcgaaccgcgcggcccgccgatcaccagcttatcgcccgttttcgccgccagcgcccagctgctggcaataccgtcatcgtgaataaaaaagtcgtacgccagctcatgacgcccggcgtcgtacagcggcgtatagtcgcgggtcgccggacgcacgccatcgccccagttaatgccttcatccgtcacctccggcggcgtgaacgcagcgcccgcggccgggaaaaagagcttggtgtggtcgtcaaaaccctgggaaacaaagccttccagcgcctctccgcccagcacgacacgctggaatgcgctgccgatacgctcgacgcgcaatacggttaactcacggaagcgcagttcattacgtacgcgctgcgggtatttggggtgtctggtcgttgtcatctttcatagccttcgtgaacggaatagatatatctaaaaatattgcaaatgataatgattgccattaaaaaagaatgcaagcgttttttgatatagtcatagaaaaacgccacaaaagccaaaatcaaaaattaaaacgttaaatatcaattaaataaaaaatacattcactactttgttgctactttattatttttagatataaattagatatatcaaataatcacaggagcaaaacatgagacaccatcacgaagaaggccgtggcccacgcggacgccacggggaacatagcgaacacggcgagcacggtcgcagaggcggcggacgccggcagcgcttctttggtcacggcgagctgcgcctggtgattctggacatcctcacccgcaatgccagccacggttacgaactgattaaagagatcgaaaccctgacccagggcaactacagcccgagccccggcgtcatctacccgacgctcgatttacttcaggatcagggattaatcagcgtggctgacgaaaacggccgcaaaaaaatcgccattaccgccgaaggcagtcagctgcacgcggaaaacctggagcagctggagcatattcagaccaggctgcaggcgcgcatggtgggctgtgaactccgtaaaaatccgcagatgaagcgcgcgctggagaattttaaggcggtactggatttaagggttaaccagcaggaaataaccgaagctcagctaaagcagatcgtcggcgtcattgaccgcgcggcaatggaaatctcccagctcgactagccctctgctccatcgccgggcagcctgcaccgccgcgaagcacgcggcgggaccccttctgcgcatggtttcacgccttcaggagtaaaacatgccaataatttcgcgataagattaaattttgctcaaccgcaatttcacgttgcgtttatcccgattttcctggcccgcgccgaagtggcgtaatccctgcaatacttaattcagtatcatgtgatacgccccgcccaggagcatattttgaacaggttaccttccagcgcatcggctctggcctgcagcgcacacgcactgaatctcattgagaagcgaacgctcgatcatgaggagatgaaatcacttaaccaggaggtcagggaatactttaaagagcatgtgaacccggggtttttagcgtatcgaaaatcggtcactgctggcggggattacggagccgtagagtggcaagcgggagggttaaatacgcttgtcgacactcagggacaggagtttatcgactgcctgggtgggtttgggatttttaatgtagggcaccgtaatccagttgtcgtttccgccgtcgaaaatcagctcgctaaacaaccccttcatagtcaggaactgctggacccgctgcgggccatgctggctaaaaccctggcggccttaacgccgggcaaactgaaatacagcttctttagcaacagcggtaccgaatcggtcgaagcggcgttaaagctggcgaaggcttatcagtctccgcgcggcaagtttaccttcgtcgccaccagcggcgcgtttcacggtaagtcgctgggcgcgctttcggccaccgcgaaatcgactttccgtaagccttttatgccgctgctgccgggattccgtcacgtgccttttggcgatatcaacgcgatgcgcaccctgctgagcgagtgcaaaaagaccggtgatgacgtcgcggcggtgatccttgagcctattcagggcgaaggcggggtgattctgccgccgccgggctatctgcccgcggtgcgcaagctgtgcgacgagtttggcgcgctgctgatcctcgatgaagtgcaaaccggcatggggcgcaccggcaagatgttcgcctgcgagcatgaaaacgtccagccggacattctgtgccttgccaaagcgctgggcggcggcgtcatgccgattggcgcaacggtcgccaccgaagaggtattctcggtgctgttcgataacccgttcctgcataccaccacgttcggcggcaacccgctggcctgcgcggcggcgctggcgaccatcaatgtgctgctgacgcaaaacctgcccgcgcaggcggagcagaaaggcgacatgctgctggacggcttccgccagctggcccgcgaatatccggatctggtgaatgacgtgcgcggcaaaggtatgctgatggccattgagtttgtcgataacgaaatcggctatgactttgccagcgagatgttccgccagcgcgtactggtggccggaacgctcaacaacgcaaggacgatccgcattgaaccgccgctgacgctgacccctgagcagtgtgaacaggtgctaaaagcggcccgcctggcgctggcggcgctgcgggtttcggtggaagaggcgtagtgacctgccctctccctcacagggagagggcattgcgttataccacccgcacgccagcaggcatcgccctttccggcgtaagcagtacgctttcgctgccatcgtcggtttcggcgcaaagcagcatgcactccgaggtttcaccgcgcattttggctttcgccagattacacaggaccacgaccgtttttcccagcaactcttcttcgctgtagtacggcacgaggctggttaccgtctgcagcgtgcgatcgccaacatcaatccgggcaatatagagcttgtcggcattctcatgtcgttttatcgccacaatttttcccgtacgcatttccagtctggcaaaatcagcataaagcaccgtttccatcttgcacctctcaagtaaaattttagtaaaagataacaaatgtcggcgaggtttccgcataatagtgcgaagaatgttagattcatcactcttttgcgcgctggaaacgctgcggtggggatgaataatacggcggaaatttactgaaaagagatgcagctgcccgcgcttgctttacaatggtttgcgtcgatggggcaacgtcagataaggaaaacaatggccacactaaaagatatcgcgaccgaagcaggcgtttcactggcgacggtttcccgcgttttaaacgacgaccccactctgaacgtgaaagaagagacaaaacatcgcattcttgaggtggcggaaaagctggaatataaaagtaccagctcgcgtaaggctcaggttcacaccgtcggccaccaccatattctggccatctacagctaccagcaggatctggaaatcaacgatccttactatctggcgatccgccacggcatcgaaacgcaatgcgaaaagctcggtatcgagttgaccaactgctactttaacaacgcgctacccgagctgaaaaaagtgaccggcgttctgattgtcggccagccttcgcgggcaattcgcgacgccgccacggcgttaaccgacaacgtctgctttattgatttccatgaacccggcagcggctatgacgccgtcgacatcgatctggtgcgtatcgccaaagaagttatcgacttttttatcgcccagggcgcgcggcgcatcggctttattggtggccaggatgagccgggtaaagccgacatccgcgaagtggccttcgtcgaatatggccgcctgaagggagtggtttcggaagaagatatctggcgcggcgggttttccagttcctccggctatgagctggcaaaaacgatgctggcaaaggcggatttccccaccgcgctgttcgtcgcatcagactctatcgccatcggcgtgctgcgcgccattcatgaacgcggtctctcgatcccggaagatatttcgctcattagcgttaacgatatccccaccgcgcgttttacctttccgccgctctccacggtgcgcattcattcagaaatgatgggcagccagggcgtcaacctgctggttgagaaagcccgcgatggccgcgcgctgccgctaaacgtctttgtccccagcgtgctgaagctgcgcggcaccacccgctaatcccgtttctgacgctaaatcctctgcgcccggcccccgggggcggcgcttatcgcgccttgcccgggctacgggttcaccgccgcctgccaaacagtagcccggacagatgcgccagcatcgcctccgggaaattccgcctctctgcgcccggctcccgggggcggcgcttgacgcgccttgcccgggctacgggttcaccgccgtctgccaaacggtagcccggacagatgcgccagcatcgcctccgggaaatccccctctctgcgcccggctcccgggggcggcgcttgacgcgccttgcccgggctacgggttcaccgccgtctgccaaacggtagcccggacagatgcgccagcatcgcctccgggaaactccacctctctgcgctctgctcccgggggcggcgcttgacgcgccttgcccgggctacgggttcaccgccgtctgcaggccggtagcccggacagatgcgcagcatcgcctccgggaatgtccccttcccgacgccaaccgcaggcgcccggtaacgctcattttgtgatcgagttaaagtaaatcgctcccggtgattttatttagtaaaagttttactaaaataacctctatccgtttagtccgttcagggaggcgatatgaatcgctgggaaaatcttaaactcactcatgaaaaccggctgcctccgcgcgcctatttcttctcttacgattcgctggcccaggcgcgaaccttcgcccgtgaaaccagcagccgctttttgtcccttagcggacagtggaacttctgcttctttaacaacccgctgcgggtgccggaagcgttcacctcgcaatacatgagcgactgggggccgattaccgtaccgggaatgtggcagatggaaggccacggccagctacagtacaccgacgaaggctttcctttcccgattgacgttccctacgtgccgaccgacaaccctaccggcgcctatcagcgcatctttaccctcagcgagggctggcagggccagcagaccctgattaaatttgatggcgtcgaaacctattttgaagtgtacgttaacggtcagtacatcggtttcagcaaaggcagccgcctgacggcggagtttgatattagtcacgcggtaaaaatcggcgacaacctgctttgcgtgcgcgtcatgcagtgggcggactccacctatatagaagatcaggatatgtggtggtcggcgggtatcttccgcgacgtgtatctgatgggcaaaaacccgcttcacgtccaggacttcactttgcgcaccgattttaacgatgactacgtcgacgccacgctctcctgccagctggtgctggaaaatctcgccgcgcagccggacgcagcgacgctggaatacgcgctgttcgacggcgaaaaggtgctgtatgaaggcgcaacgccgcgcctgagcgtcagccagctgctgaacgtcgactttgcgatcgacgtgaaggcgccgcagcagtggtcggcggaaaatccctggctctatcacctggtgatgacgctgaaaaacgccgccggggagattatcgaagtcattccgcagcgcgtcggttttcgcgatatcaaagtgcgcaacggcctgttctatatcaataaccgctacgtgatgctgcacggcgttaaccgtcacgacaacgaccatctgaagggccgcgccgtagggatggatcgcgttgagaaagatctgctgctgatgaagcagcacaatatcaactcggtacgtaccgcccactaccccaacgacccgcgtttctatgagatgtgcgacatttacggcctgttcgtgatggcggaaaccgatgtcgaatcccacggcttcgccaacgtcggcaacctgagcgccatcaccgatgacccggcatgggagcatatttacgttgagcggatcgtgcgccacgtccacgcgcagaaaaaccatccgtcgatcgtcatctggtcgctgggcaacgagtccggctacggctgcaacattcgcgcgatgtatcacgccgctaaggcgatcgatgatacccggctggtgcattacgaagaggatcgcgacgcggaggtggtggatatcatctccaccatgtatacccgcgtaccgctgatgaacgaatttggggaatatccgcatgccaagccgcggattatctgcgaatacgcccatgcgatgggcaacggtccaggcgggctgagcgaataccagaacgtgttctatcagcatgacagtattcagggccactacgtatgggagtggtgcgatcacggaatccaggccaccgacgacagcggcgcggtatggtacaaattcggcggcgactacggcgactatcccaataactacaacttctgcctcgacgggctgattttctccgaccagacgcctggacccgggctcagagagtacaaacaggttatcgccccggtaaaagttcaggcgaccgacatcgcccgcggcgagctgcgcatcgataataagctctggttctcgaccctcgatgactacaccctgcgcgtggaagtgcgcgccgagggggctacgcttgccagccagcagcttaaggtgcgcgatcttgcgccaaacagcggccgcgatatcaaaatcgacctgccggcgctcgacgaccgcgaaaccttcgtcaacatcatagtgaccaaagattcccgtacgccgtacagcgaagccaaccacccaatcgccgtctaccagttccagctcaaagagcagaccgcagcaaaaacaccgctgattaacaccagcgccacctcgctgcacattgccgatgaacgactgagctacagcatcaccgggcataacttccgcgtggtcttctctaaagtcagcggcaaactgagcgaatggcaggtgaacggcgtagaccaggtgacccgtgagccgaagattaacttcttcaagccaatgattgataaccacaagcaggaatacgaagggctgtggcagcccaatcatctgcaaatcatgcaggagcatctgcgcgaattcagcgccgagcagcgcggcgatacggtgattatcaccgcccgcagcatcatcgccccgccggttttcgatttcggcatgcgctgcacctatcgctggcagattaccccgcagggccatattaacgttgagcttgcgggcgaacgttacggcgactatccgcacatcgtgccgtgcatcggttttatgctgggcattaacggtcagtttgaacaggtgggttactacggtcgcggtcccggcgaaaactacgccgacagccagcagagcaacatcattgacctctggcgcaccaccgtggacgacatgttcgtgaactatccgttcccgcagaacaacggcaaccgccagcacgtccgctgggccgcgtttaccgaccgtcacggcagcggtctgatggtggtcccgcgcgatccgctcaacatcagcgcctggcactatacggcggagaatctgcacgccgcgcagcactgtaacgaactgcgtcgcagcgatgacatcaccctgaatatcgacgcccaactgctcggcctgggctctaactcctgggggagcgaggtgctggatagctggcgggtgtggctcaaaccgttcaactatggctttacgctgctgccgctggaaggcgggagcgcttcctcgcagacgctggcgaatcatagctttggcgccggtttcttttcctccgattcacacagcgaggctgaaaaatgagaattctcgataacttagaacagtttaagcaaatttatcacagtgggcgtaaatggcagcgctgcgtagaagcgattaataacatcgacaatattcggcccggggtggcccactctatcggcgattcgctctcctatcgcgtggcaagcgacagcaccacggatgcgctgttcgttggcaaccgccgctatttcgaggtgcattactaccttcagggtcagcaaaaaattgagtttgccgccaaagagcagctgcagaccgtggcctgctatcgcgatgaaaccgaccgtgaatatttgaaaggcattggtgaaaccgtgcaggttcacgaaggacaaatggtgatttgcgacacccatgaagcctatcgctttatctgcgactcgccggtcaaaaaggtggtgctcagagtaactatcgaagacggctacttcctgaataagtaagcccgcgtgaagcaagatgaggccagcgggttgactcgctggccttcccggccctaaccctcaatgcgggccagataatttttcggaggacttatgtccgaatcagttcgtgccaaaataggtaaattcgccctgctgtcgatggcgtttgccgccgtatttaacgtacgaaatattgttaataacaacatcgagttagggctcagctccgcccctatctttctgtttgcgacggtggtctattttattccatttgtgtttatcatcgccgaattcgtgtcagcgaataagaattccgaatcaggtatgtacgcctggctgaagcagcctttaggtacccgcgcggcctatctcggctcgttcctgtactggtttgtgaacctgttctttttcctgtcgctgctgccgaacgtggtggcctacgcctcgtacgccattatgggttacgccattcctttctcgccgatggtcacgtcgctgatctctatcgtcctgttcgccatggccacccacatttccactaaaggtgcgacctggctggggaaaatctccgaatgcgtggcgtatggcgtcttcgcgctatttgcgatttacgtggtcggcgcttttaccgcgctgggcgcgggccatgtccccgcgcagccgattacgctgcacgccatggcgcctaccatcaactgggcgacgctggggatcatgtgctggattttccaggcggcaggcggggctgaaaccgtcgccgcgtacctgaacgacaccaaaggtgggcagaaatcgtttattaaagtcatcatcaccgccgggatcctgattggcggcatgtacgcgctgggctctttgctggtcaacgtctttgtggcacgtgaagatctgacctatgcggccggcatggtggaaatcttcaccggcctcggcgcctatttccatatttcagaagcgctgatgggccgcttcgtcggcatcattctgtttatcgccattttcggcagcatgatgatgtggaccgccgcaccggtaaaaattcacttctctgaaattcctgccggcatctatggcaaaaaaaccaccgagctgaacgtccacggcgtgccggtgcgcgccgcctggtggcaatttgtcttcgtctttctgatgctcatcgtgaacggtttcggctccgccagcgttcagcaaatgatgaacaccgctatcaacctgaccgcgggtaccgcgatgctaccgccgctgtttatcatggccgcctactttgttttccgctggaaacacgacgacacgccgcgcgacttccgcatggggtcacgaaaggttgggatggccgtggtgtcgatgctgatggtgattttcctggtcagcatgaccgcctcggctttcccgccgggggtcgatctggtgaatgccttcttcattaacgtctttatgaccgcagtcttctccggactcgcgtggtggtggataacccgctttgagaaaaaacagcgcaagagccaaccatcggtgctgaaatcagccgtaaatccggtgaaataagcgaccgttcctcccgccagcgttaaatcgcctggcgggatttttttacccgccagccgggatctcacgctcaaccattttcgtgatcgagttaaagcaattcatttttaccgcttttatttactaaaatttttactaaaattaaccgcaatacttaactacctctaccctacaaacaacacaatccccttcggccattctctgaaggacaatgtgtggagatgtgttatgtctgatatcaaacgtaataccatcggcaagttcggcctgctgtcgctgaccttcgccgccgtcttcagttttaacaacgtgatcaataacaatattgagctggggctggcgtcggcgccgatgttcttcctcgcgaccctgctctacttcgttcctttctgcctgatcatcgcggaattcgtttcgctgaataaaaactccgaagcgggggtttatgcgtgggtaaaaagctccctcggcgggcgctgggcctttattaccgcctacacctactggttcgtgaatctgttctttttcacctcgctgctgccgagggtcatcgcgtatgcctcctacgccttcctcggctacgagtacattctgacgcccgtcgccaccacgatgttgagcatggctttgttcgccctgccgacctgggtgtccaccaacggcgcaaaaatgctgggtcctattacctcggtgacctcgtcgttaatgctgctgctgacgctctcctacattctgctttccggcagcgcgctggtgggcggtattcagccagcggatccgattaccgtggatgcaatgatcccgaactttaactgggcgttcctcggcatcaccacatggatctttatggcggccggcggggcggagtccgtcgcggtgtacgtcaatgacgtgaaaggcggatcgaaatcatttgttaaggtcattatcctcgccgggatcgtgattggcgtgctgtactccatttcctcggtgctgattaacgtgtttatcagcagtaaagagctgaaatataccggcggatcggtacaggtcttccacggcatggcggtctggtttggcctgccggaaatcgtggtcaaccgttttgtcggcctggtctcctttaccgccatgtttggttcgttattaatgtggaccgcgacgccggtcaaaatctttttctccgaaatcccggccggcatatttggtaaaaaaaccgtcgagctcaatcaaaacggcgtaccggcgcgcgcggcgtggatccagttcctgattgtgattccgctgatgattatcccgatgatgggctccagtaccgtgcaggatttaatgaacaccatcatcaacatgaccgccgccgcctcgatgctgccgccgctgtttatcatgctggcgtatctcaacctgcgccgcaggctcgatcatctgccgcgcgattttaaaatgggctcacgcaccaccggtattacggtggtctcgatgctgattgttattttcgctatcggcttcgtcgcctcaacctttcccaccggcggcaatattctgaccattattttctataaggtcggcggcattgttatcttcctcggatttgcgtggtggaaatacagcaaatacgtgaagggattaacggcagaagaaaaaataattgaagcggcgccggcttccgacgcgtcataagccattttccctaaaataataaattacaatatctcttaataatgcgatgaaaaagaataacttgatttacggggcgcttgccgccctggccttctgcacacctgccatagcggctgatgttgctcacccggcggaacatgatgatatgaaaacgcctgaactgagcaccacttcctatcgtttttacggtgaactgggggtcggcggatatatggatttagaaggcgaggataaacataaatatagcgatggcacctatattgaaggcgggctggaaataaagcacggcagctggtttggcttaatttatggcgaaggctggactgtccaggccgatcgtcaggggaatgcctgggtaccggatcacggctggggcggattcgaaggtggaataaaccgcctctacggcggatataaaaccgatagcagcaccgagattatgctcagcctgcgccaggattcatcgctcgacgatctgcagtggtggggcgatttcacacccgacctcggctacgtgatccccaatacgcgcgatattatgtacgcgctcaaggtgcagaacctggcgggagattttcgctacagcgtgaccgccacgcccgccgggcaccacgatgaaagcaaagcgtggctccatttcggcaaatacgaccgctacgacgataaatatacctacccggcgatggtcaacggctacgtccagtacgatattgccgaaaaggtcacctggatgaacggtcttgagctgaccgacggtaccggtcagctcttgttaaccggtattctcacccccaatctcgccgcccgcgcctggcaccataccgggcgcgccagggggcaaaacgtgccgggaacggagaccggctttatggccagcgccatgtatgaagcgctcaagggcgtatatctctctaccgcctatagctacgccaaacaccgcccggatcgcgccgccgaggaaaccacctcgtttatgcagttcggcatctggtacgaatacggcggcggacggttcgcgaccgccgcggacagccgcttctacatgaaaaacgcctccggagacccgagcgaccaggttttcctgatgcaatatttctattggtaaaaagggatatcaataccgtgaaaatcatcaccactctgacgccgctggcctgcgccctgctgctaagcttttccgcccacgcgctgaccgcggatgactttaaaaatgttatcaaccgcagcggcgcgccgcaggcgatgcaggatttcgatggcgacgaccaccagcgtttcaacccgtttttcgatttgggcgcatggcatgggcatctgctgccggacggtccagccaccatgggcagctttccggggcccgcgctgctcaccgaggagtacatcaactttatggcgacccatttcgatcgcctgacggtgtaccagaacggcaaaaaagtggccttcaccatgcaggcctggagcctgcccggggcgctggtgcaaacgctctccgcgcccggcgtacagatcgagatgaccctgcgctttgccagcgcgcacacctctttactggagactaaaatcaccagcagcggtccgcttaagctggtctgggacggcgagctgctggagacgctctccgccaaagaggggaaaccgcagtcaacgcaaaccatcgaccaggccttcccggactatcagcgccgcctgagcgcgacccacgacggactgacggtcagcttcggtaaagtccgttccgcatcggatttaatgacctccggcgaatcgcagtatcagatccatcgctccctgccgacggtcacccaaatcgatggccatcgattcaccagcagcgcgcaaatcaacggctcgaccacgctctataccacctactcgcacctgctgaacgccgagcaggtgcgccttgagaaagcgcaaatccgcgatattctggcgcgaccggcgcactatctgcgcgcttccgaggcgcgctggaacggctatctgcaaaaggggctgaccaatcctgatgccacggcgcagcaaacccgggtggcggtgaaagcgatcgaaacccttaacggcaactggcgcgcgccgggcggtgccgttaagcacaacaccgtcacgccgtcggtaaccgggcgctggttctccggcaaccagacctggccgtgggatacctggaagcaggcctacgccatggcccacttcaacccggagatcgcgaaagagaacatccgcgccgtcttctcctggcagattgccgccgacgataaagtgcggccgcaggatgccgggttcattccggatctgatcgcctggaacctgagcccggagcgcggcggcgacggcagcaactggaacgagcggaataccaaaccgagcctggcggcctggtcggtgatggaagtctataacgtcacgaaagataaagcctggctggcggaaatgtacccgaagctggtggcctaccatgactggtggctgcgcaaccgcgaccacaacggcaacggcgtgccggagtacggtgcgacccgcgataaagcgcacaacaccgccgatggcgcgatgctgtttaccgtgaaaaagggcgataaagaacggacgctttccggcctgaaaacctacgagcaggtgacggcgaagggcgattacgacagcctggagatcccggcacaggtggccgcctcctgggagtcggggcgcgacgacgcggcggtcttcggctttatcgataaagatcagctggataaatacatcgccgacggcggcaaacgcagcgactggacggtgaaatttgctgaaaaccgggataaaagcggcaatctgctcggctattcgctgctgcaggagtcggtcgatcaggccagctatatgtacagcgacaaccactatctggcggagatggcgacccttctcggcaagccggaggaggcaaaacgctaccgggcgctggcgcaaaagctcgccgactatatcaacacctgcatgttcgacccgcagagcaaattctattacgacattcgcattgaagcgcagccgctggcaaacggctgtgccggtaagccgatcgtcgagcgcggcaaaggaccggagggctggtcgccgctgttcaacggcgcggccactcaggcgcatgccgatgacgtcatttcggtgatgctggacaacaaagagttcaatactttcgtaccgctgggtaccgccgcattaacgaatcccgcgtttggcgcggatatttactggcgcggccgcgtgtgggtggaccagttctggttcggcctgaaagggatggagcgctacggccaccgcgaagaggcgctgcagctggcggacgccttcttcaggcacgcccgggggttaacctccgatggcccgattcaggagaactacaatccgctcaccggcgctcagcagggcgcgccgaacttctcctggagcgcggcgcatctgtacatgctgtataacgagtttttccgtaagccatagaatattgccctcattctacccctctcccacagggagaggggtattcaaaatcattgactataatttaatcgcggacttgttataactcactgagtaaaaagataaagctttaaatttattgttatcagttaatgggcttaaagaaattgaaatgctagttaagcatcaaaagtttcgctgaatcattcaccagataattattaactaaatatgaattcctggtctgaatttcattgaagaaattcagattccttttattatttatgtgatcacgaccgcattatttaattataaaaatgtgtgatgttcagtctttcattagagtggtgaatcacgcatgtactttctccaggaagataaaaacatccatcagtatatatgtcagcacgaattatgggttccagggcgcgttgttgatctatataacagcaatacaaacaaaaaagaaaaaatgttagagccgctttggagaaaatacaatgcaaatttagagggggtaatggtatttttatccagaatagaagctacaatatacagtatacatctggagaaaaaattcagtgaaaaatgggcagtttattccctgaatgaatttaacattaaagaaatgatgattcataatcagcgtgttaaaaaaagtgaagattataatgtattgctgagtgcaggtttttgggctaataaagataatcaattaatgtattcaggacatcatcttgtacaggttacgattccgattacttataactccaatgctgtagcaaatgaaaatggtcatgccatattaagaataccatcaaacgtcatagaacactttgaaaaatactggaaatcaagatttgcagattttaaagattatactgaattccttgcaggttcgaataatgaaatcattcaggaacaagccttacttgcatacaataatttaagcttaattgaatctaacagtatagaagactgccaatatattaccacatggaaaaacaactggatttttaataatccagaaaatttaactttgattaaatgaggtcattatgggcattggctattttttagtgcgtggtaatagaacaacctgtggtggtagtattatagaaggatgtgataatcattctatacacggtcaggccacagcacgtaatggtgataaatatatatgtggagttgataaaaaaatatatcatattgcgggaggcatacctaattattttatacatggcgttgcagcagctggaactgcacatagcagagggacatgtgcttgcaaatgctattttataaattcttttactgattgtatttatggatatgaatctgaaactattaaaagtactgcgagtgctacccggcccacttcacccatacactcacaatcattatcagaatcatcaccagcaccaaaacccgttacacccgttgtagaacttgctgaagcgcctacaaaaccgcaggaaaagcgtgaccccgtagatgcaggcttttgcgtactgccctatggcgcgactcccgcatcatatgaaccgtatcttttcactacgcctccagcgggaacacgagaactctattatcaactgaatccagaaatgaagaaaaagcctggttcgatattaatcgtggtggatcctgaaaagcaggaaccagaacaggttgagacgctacagcgagcaagagacagaattgatgcagcattggcccctctgacagttcaggaagcaaagttattgcatgataacagaggggcggtagatgcattttcatatcagctttttgccgataatttaggtaaagctggtgatggattaggctatatcagtgaaataggaaaaagttattatgatgaaatcaatagaattttggttgagattgaagatttatataaaaacacttacaatcgcaacagaggtattatttcaggtcaagagttttttggtcaaaggacaaggttattcaaacaacttgatttggttttaactaaattctcaaaagcacagttaaacttaggcgaatatcagagcattaaaagagtgttaggcttgtcaacaagatctattatgcaccgctgggatagaacaggtgttgataatatagaaggatatgcaacatatattgaacagtcagctaaacttatgaagattatgaaaacagtagggtatgtgggcataggtttagattttgcaagttatacttcaaatgtttatgatgcatgttcgaaggggcgagaaagtgaatgccgtaaggcagctattactgaatatagtaaatttgggtttaagcaaattggaagtgctgctgttggtagtgcaagtggatgggctgcccgtggagcctgtatgtggatactgggaatagtaacttctgaagttggcgcattaggcgctggcttatgtttagttacaggagtgggagcttcgctaggagcagcaaagctagttgaaggaggagcagaagatttaggtgaatcttttggaggggatattctttatgagaaactttttaaatagcaatccgaatttcattgtttatctggtggcattttctatgcttggcatgttattaattatgataatttcatttattaataagattgcctacagaaaaatcgtttcgctttatattaataaatattcacggctaccaataacagcagcattagcaaaagaggctagtttaatagtcacgccaggtgcatattttgcaaaaattggattcattatagaaacattaacattgccatataataaaatatccaatcatgatatgacaaaagaacaatatgattatataaacaatttaccaaaaaaattgactattggttttaaaatagaagcagttttatggattatttccatacctacaatgatagtagggtttatattgcaagcagtttataattaaaaaaaggactctgttgagtcccttttcattttttcgttgttatttcagtgcaccataaatctgttcgacaatccatctatatgtcgccactggcgaatgcggcctgttaccgagaataacgatagccggatcgatggccgtaaacgtgcctgtccatcctgtggccgtatgtcaaaaagtcgacatgacaacaagccgtagccatatcagtaagcacattagtacggaaggaatggataccgtgtagagatgtggaaaagcgcttctggcagactgtaataaatgcacgatgaagtctctgctgttttgttagcgcaaccagcagatcgcacttcaccgtgcttttcatttttctggggtacctcagcccttcaggaaagggccggggtgagggctcgtcttacacctccggcagcaggccgataaagctgcgcttctgccgcggctgcgacatcagcgcctccagcttcgccacgcaggccagatagtgcggggttttcttgtgcgccagcaccgcttcatcatctttataggcttcataaataaaaaagcgcgtcttcacctccgggtcctgcaggacgtcaaagcgcagattgcccggctcctgcagcgccccttcgtagttggcgcggaacacctcaagaaactcgtcgacccgttccggtttgatattgatttccaccagcgttacgttcattgcagctctccctgtttttcctcctgccagaactgatacgcctcgcgggcactcaggttctcatgcaccacttttttcaccgccttcagcatcgcgcgcggcgcgctggactggaagatattccgccccatatccacgccggaagccccctggtcgatcgcccgccagcacatctccagcgcctcctgctccggcagctttttacccccggcgatgacgatcggcaccgggcagctggcggtgactttctcaaagccttcctcaacaaagtaggttttcacgaactgcgcccccatttcggcggcaatgcggctggccagcgagaagtagcgggcgtcgcgggccatctctttgcccacgccggttaccgccagcaccggcataccgtagcggttgccggcgtccaccagcttgataatgttgttgatggactgatgctcatgctcgctgccgatatagacctgcgccgccaccgcgcagacgttcaggcgcagcgcatcttccatcgccaccgccacgcactcgttggaaagttcgctgaggatcgagttgccgccggaagcgcgcagcaccaccggtttgttggtcgccgccggcacctgactgcgcagcacgccgcgggtgcacatcagcacgtcggtctcttcgaacagcggcgcaatagagagatcgatacgctccagcccggtggtcggcccctgaaaatagccatggtcgaacgccagcatcaccgtgcggttgctctgcgggttgaagatacgcgccagccgcgactgcatcccccactccagcgacccgcagcccttcagcgtatagagcgtattctgctgcggacggtctaagccgaagttttttccctctttgatatcgtctaaatcagccatctcatcctccatcagaaatcgtagttattgatattctctttggtgaacaccacccgctccggcagcagcacgatgccgttgcctttcgcttcatactgatagccctgcacgctgttgggctcgactttcagggcgccgagatctttcacatcaacgctgtcgccgacgttaagatcgccctttttcagcagacgatcggcgacgttaaccgcgatcttgccctgctgcaccacgtcccacaggccgaaggcttttaccgtgccgcgctccacgtaggggcgcatcacgttcggggtactaaagccgacaatcgccacgccctggcgcttgagattctctgccgcctgggcagccgccggaagcgcgttggcgtccggggcgataatggcgtcgagatccgggtacgcttttaagatcccctcggcggtttgcagcgatttagtggcgtcgttatagccaaactgcgtggtcaccacttcccactgcggatgcgctttttcgattttggacttcgcctcttttacccactggttctggtcggtcaccgtcgggctggagtagaaaaacgccactttggcgccaggcttcgtcacctgcttttccgccatctccaccagcaggccgccgagctgctgcggcgtcccctggttgatatagatgctgcggcactctggtttggtatcggagtcccaggtcaggaccttcaccccgcgctgcatcgcccgcttcagcgccgggcacagcccgtccggcgatacggcggaaacgataatcgcgttgtagccctggttgacgaagttgttgatcagctgcacctgcccggagacgctcggttcggtcgggccgtcgtaggtgacgtccacgccgagcgctttgcccgcctctttcgcgccgttaccgccgctggtaaagaagccgacgccaaccagcttaggaataaaggcgatacggtccgccgcctgggccgatgccatacccagcgccatcgccagcacgatcagttttgttttcattttatgctccgattgttttacgcgagaaaagacgccgccagctcatccgcacccattcacggtgcaggctcagcgaacgccccatcaccaccacaaccaacagcgcccctgacagcgcgctcgacacctggttggggatgccgaccatttgcaaaccttgttgtaaatagcccaccagcagcgcggccagcgccgtgccgacgatcgagccggaaccgccgtagatattggccccgccgagcaccgcggcggtcagcgccggcatcagcaggtcgcggcctaagtccgagcgcgccgagccgaaataggagaccatcaccagcgccgctaccgccgacgccacgcccaccaggccatacagcgcgtagggcatcccgttaacggaaagcgcggcgtagcgcgcggcgcgcgggttctgcccgagcagaaaaaggtgccgcccaaagcgcccgcggtgggccagcagccagaagaaaaaggtgataacggcgaacagcaccagcggtatcggcaggccgaacagggtcaggttggcgaaggcggtaaagctatccgggaatccgccgatgccttcgtagccggttgccccggccatgccagaaagcagcagcgcgccgccgccgtagaggtaaagggtgccaagcgtaatcaccagcgggctaatgccggtgtaatgaatcagcgccgcgttcagcaacccgcacagcaggccgagcagcagcgtcagggggatcgcgagactcatgggccagcccgcctgcatcatcacccccagcgcgatggcgcacaggccgatggtggaaccgagcgaaatatcaatcccgccgctgataattaccagcgtcagcggcagcgccacgatgccaatgcagataaagtcgctggtgctgaacagcagcatattgagatccagcatgcgcggattcagggcgccaaacagcaggatctccagcaccagtagcgccagcagcgcgctttcccagttgagcttcatttacgccacctctttgtttttgcgttcgggaaacggggccacgcgcttgccccctttattaccgggctgaaagcggctgtacttcagcgcccgctgatggcgggccagcgcctgacgcagacgcccgtcgagcaccagtacgccgagcagcaccaggccggcgatgaagtcgttccaccacgccgggagacggaacagcaccagcacggtgtcaatttgggtgaggaagaaggcgccgagaaaagcgcccagcagcgtgccggtaccgccaagcaacgagatcccgccgagcacgcaggcggcgatggccttcatctccaggccgctgccggtctgattgggcacaaagccaatctgcgcggcgaacacaatcccggcgcaggccgccagcatgccgttaagggtaaatgccagcatccgcgtgcggttcaccgccaccccgagctggcgggccgcggcgaggttatcgccgacggcgtaaaaatcacggccaaaggcggtgcgcgacagtatccagccgcccgccagcagcagcgccagcaccagccagcccagcggcgaaataccgatgaacgccggttccgacagcgccttcaggctgttcggcaagccttcaatccacttaccgccggtccacagcagcatcaccccgcgataaagcccgagggtgccgagggtggcgacaatcgccgggatgcgcagccccaccaccagcaggccgttaaaggcgccggccagcgcgccgatcgccagcgcgaaggcgatggcggtcatcaggccatacccgctattcagtgccacgcctgtcgcgatagcgctcaggccgacggtggagcctaccgaaacgtctatattgcgggtcagcatcaccagcgtcgcccccagtgccagcaggcaaaggatctgcgcgctggcaaagatcatggccagggtttgcaaactgaaataagccgggttgagcgccaccagcccggcaaacagcaccacgatggcgagaaaggcgctcagttcacgattctttaataacgttttcatgcctgtcctccgaaggccagggtcatcatccggtcaacgctgaccgcctgctgcgccagctcgccgctctgcctgccctgatgcatcaccagcacccgatcggccaggccaacgaactcgtcgagatcgctggagatcatcaataccgccacgttctgcgcggcgacgcttttcaacagctgatagatgtcggcgcgggcggaaacgtccacgccgcgggtcggctcatcgacgatcagcagcagcgggttagcctccaggcagcgcgccagcagtaccttctgctggttaccgccggagagcgtgcgcaccgggcgatcgccatcggccattttgatccccagcgcccggtgatagcgctccaccaccgccgcttcgcgcctgttctgctgccacagcgacggctggttaaacatcaccgtgttccagcgcaccggcgcatcgagaaacagcccggaaacctgcctgtcctccggcagatagaccagcccgcaggccagcctggcgcgcgtactgtcgcggctgatatcgcggttttccagccatacccgcccggcgcgcgccggtcgcagaccgtagagcgtttcggcaaattcggtgcgcccggatccgaccagcccggcgaggccgacgatctccccggcgcggatctccaggttgagatcgataaaaccttctccggtcagatcttcaaccctaaggaccgggaaatcctgcgcctgagtgcggcgattgcccggcagcgccagccacagcttttgcgtgtcgctcagcgcacgatcgcggctgacgggcgtcattgcgccgatcagctgattgtcgccgtagtgcgcggtttccccgctcagcaccaccgcgccgtcgcgcatcaccgagacgtggctggcgacctggcggatctccggcagcttgtgcgagataaacacgatcccgacgccgagcgcctgcaaagagcggatctggcgaaacaggcgctcggtttcccccggcgtcaatgaggcggtgggttcatcgaggatcaggatctgcgcgtcgcgcatcagcccgcgcaggatctccaccatttgttggtcggcgacttccagggtgctggccgccgcctcaaggttaagctggcagctaagctgctgaagcttttcctgcaggcgggcctcggtatccgcccgctttggcagacgaaaaagaatattttcccgcaccgtcagattggggaataacattggttcctgcggcaccagatacacgccctgctgatgggcctgggcgggagtaaggcgcgcaaatgtacgttcgccgaggatgagctcaccgctgtcgggggtctctaccccggcgataatcttcatcagcgtcgattttccggcgccgttaccgcccatcagcgcgtgcacctggccggaaagcagcgtgaaatcaatctgcttcagcacggtgacgccggagaactgtttgccgatttggcgagcttcaagcagtggcttcatcatcgcgcctcattttgaacaaaagattttttaaattaataatgttcaaaagcgtagacggtgaactatatttacaaccgtgcaacgatcacagttttatgctttcgatcgtttgaagaaaaccagcggacaacgaaagatccgttttgccagtcggctcacattttccgaccgcgcaataacgaacatatgatctaaatttttataagagttcaatttatgagcgaaaaacgcattacggaagagagccgctacgccgggctggcgttagccgaggaggagctggtggcgcgggtggcgtggtgttactaccacgacggactgacgcagaacgacatcggcgagcgtttagggctgccgcggttaaagatctcccgcctgctggagaagggccgccagtcgggggtgatccgcgtccagattaattcgcgctatgagggctgcctggcgctggaaaccgaacttcagcagcgtttcggtctgaaaattgcccgcgtgctgccggcgctgaataccccgccgatgaacacccgcctggggattggcgcggcgcaatcgttaatgggcgtgctggagccgggacagctgctggcggtgggctttggcgaagccaccatgagctgcctgcagcacctgagcgggtttatcggctcccagcaggttcggctggtgacgctttccggcggcgtgggcccgtatatgaccggcattggccagctggatgccgcctgtagcgtcagcatgatccccgcgccgctgcgggtgtcatcggcggatgtggcggagatcctgcgccgggaatcgagcgtccgcgacgtgatcctggccgcgacggcggcggatgcggcggtggtaggtatcggcgccattgaccagcgccgggacgccaccatcctgcgctccggctatatcagcgaaggcgaacagctaatgtacgcccgcaaaggcgcggtcggcgacattttaggttatttcctgcaggccgacggcaaaccggttgaagggctggagatccatcgggaactgctcggcgtcacccttgatgaactggcgcagctgccgaccatcgtgggcgtcgccgggggcacagaaaaagcgcaggcgatttacgcggcccttatcggcaagcggattaatggcctggtaacggaagagacaacagcacgcgcggtgctgacgctggcctcataacggccctgcgccgcgcaacacgagcgaggcgcatgtcatgagttacctgttagcgttagatgccgggaccggcagcattcgggcggtcgtattcaatctccagggccgccagatggcggtcggccaggccgaatggaagcacctgagcgtggacaatgtccccggctcgatggagttcgatcttggcaccaactggcagctggcctgtcagtgtatccgtcaggcgctggccgccgcccatctctctgcggcggatattcagtccgtagcctgctgctcgatgcgtgaaggcatcgtgctttacgaccgcaacggcgaggccatctgggcctgcgccaacgttgacgcccgcgccagccgcgaggtggcggagctcaaagagatccacgacgaccgttttgaatccgaagtgtacggcgtgtccgggcagaccctggcgctgagcgccatgccgcgcctgctgtggctggcccatcatcgcccggatatctaccgcaaagcggcgaccatcaccatgatcagcgactggctggcggcaaagctttccggcgaactggcggttgacccttctaacgccggaacgaccggcatgctcgatctcttcagccgcgactggcgcccggcgctgctggatatggccgggctgcgggccgatattctctcgccggtcaaagagaccggcagcgtactgggagcggtgaccgacgcggcggcggcgcaaagcgggctgcgcgcgggcacgccggtggtgatgggcggcggcgacgtccagctcggctgcctgggcctcggcgtggtgcgcgccgggcagacggcggtgctcggcggcactttctggcagcaggtggttaatttgccggaagtccgaactgacccggagatgaatattcgcgttaacccgcacgtcattcccggcatggcgcaggcggagtccatcagcttcttcaccggcctgaccatgcgctggttccgcgacgcgttctgcgcggaggagaagctgattgccgggcgcctcggcgtcgacgcctacagcctgctcgaagagatggccagccgcgtgccggcgggttcccacggggtgatgccgatcttctctgacgccatgcactttaagcagtggtaccacgctgcaccatcgtttattaacctctccatcgacccggaaaaatgcaataaggccaccctcttccgcgcgctggaagagaacgcggcgattgtctctgcctgtaatctggcgcaaatttcgcagttttccggcgtgcagtttgacagcctggtctttgcgggcgggggctcaaaaggcgcgctgtggagccagatcctcagcgatgtcaccggcctcccggtgcgggtgccggaggtccgcgaggcgacggcgctgggctgcgcgatcgccgccggcaccggtgccgggctgtacggcgatatggcggcgacgggcgagaagctggtgagctggcaccgggaatttacgcccaatccggcgcatcgcgagctgtatcacgagatgatgatcaaatggcagtcggtgtacgccgagcagctcggtctggtggacagcggattaacgacctcgatgtggcaggcgccggggctgacgcgccgtgcccctgttgccccctcaccctaagcctctcccctacaggagaagaaaccgtccgggcataactggccccggcgccattccgcccttctccctctcccggagggagagggccggggtaagggagaaccttccgccgttctttgaatcccatcacaatcgccgcactccccttttcccttttcgcccgcggcggctaaattagtaactcatccgaccacataacaataattttacactggaagagattatgagccgctacccgtcgcttttcgccccgcttgacctggggttcacaacgctcaaaaaccgcgtgttgatgggctcgatgcacactggcctggaggagctgccggacggcgcacagcggctggcggcgttttacgccgagcgcgcccgccacggggtggcgctgatcgtcaccggcgggattgccccggcgccttccggcgtcaccatggcgggcggcgcggtgcttaacgacgccagccatctcgctcatcaccgccatatcaccgatgcggtacacgaggagggcggcaaaatcgcgctgcagatcctgcataccgggcgctacagctaccagccgcagctggtggctccttccgcgctgcaggcgccgatcaacccctttacgcctcacgaactgagccacgaagagatcttacagctgatcgatgattttgcccgctgcgcccagctggcgcgggaagccgggtacgacggcgtcgaagtgatgggctcggaaggctatctgattaacgaatttcttgccgcgcgcaccaacctgcgcgacgaccagtggggcggcgactacgcccgacgcatgcgttttgccgtagaggtggtcagagccgtgcgggagcgcgcgggcagcgattttattattgtctaccgcctgtcgatgctcgacctggtcagcggcggcagcaccctggcggaggtcaccgcgctggcgaaagcgattgaggccgccggggccacgattatcaataccggcatcggctggcacgaggcgcgcattcccaccatcgccactccggtaccgcgcggcgcgtttagctgggtcacccgcaagctgaaaggcgcggtgtcgatcccgctggtcaccaccaaccggattaacgatcccgccgtggcggaggcgatcctggcccgcggagacgccgacatggtatcgatggcccgccctttcctcgccgacagcgaatttctctctaaagcacagagcgggcgggcggatgagatcaatacctgtattggctgcaaccaggcctgcctcgatcggatcttcgccggtaaagtcacctcgtgtctggtcaacccgcgcgcctgccatgaaaccctgatgccgatagcgcccgcgaccgcaccgaagcggctggcggtagtcggcgccggtcctgccggcctggcctttgccgttaacgccgcctcgcgcgggcatcaggtgacgctctttgacgggcaccatgagattggcggccagtttactatcgccaaacagatccccggcaaagaggagttccatgagactctgcgttattaccgccggatgctggatcttaccggcgtcgcgctgcggcttaaaacccgggtgacggccgacgatctgcgggcatttgatgagattatcctcgccaccgggatcgccccgcggatgccggatatcgccgggatcgatcatccgaaggtgctgagctacctcgatgtcctgcgtgataaagcgccggtcggcgagaaggtggcgattatcggctgcggcgggatcggctttgataccgctatgtacctcagccagtccggcatcgccaccagccagaatatcgacgagttctgtgcggaatgggggatcgataccagcctgcagagcgcgggcggattacgcccggaggggatgcagctggctaaaagcccgcgccagatcgtgatgctccagcgcaaaaccagcaagcccggcgacgggctggggaaaactaccggctggatccatcgcgctaccctgctggcccgcggcgtcaaaatgatccccggcgtcagctatcaacggatcgatgatgccggccttcatgtgacgatcggcggcgaatctcaggtgcttaacgttgatcatgtgattatctgcgccggtcaggatccccgccgcgagctggccgatccgctgcaggcggcgggtaaaacggtgcatttgattggcggctgcgacgtggcgatggagctggatgcccggcgggcaatcgctcagggcacccggctggcgctgtcgatttagggaaagaaaacccggccggtagtccgactaaggtatcagccggtagcccggctaaggcgtcagccggtagcccgactaaggcgtcagccggtagcccgactaaggcgtcagccggtagcccggctaaggcgtcagccgcaagccggggaaaccgggaaagccgataacgctcaacgctgtttgcgcatctttgtcgctttcaacaccacaaatttattattggtggcgatcgtcgtgcagttaccgaacgcgcgcttcagcttgcggaaataatcgagatggcggttgccgacgacatacagctcgccgccgtacttcaggctgcggcgggcgtcgttaaacatctgccaggcaatatgatcggtgatcgcatgctgctgatgaaacggcgggttgcagaggatggcggcgaagcggtccggctcaatatcggacagcgcgttattcaccacaaactcgcagcgctcgaggtcatccggcatattggtttcgacgttcagccggctggaagcgaccgccatataggactcatcggtaaacatcacccgggcgtccgggtttaaagccagcgctttcaggccaatcacgccgttgccgcagccaagatcggcgatctcgccttcaatatttgccggcagatgctccaggaagaagcgcgcgccaatatcaaggccgctgcgggcgaacacgttggcgtggttgtgaatcgtccacggcgtaccgtccagcggccagctgtaggtttgcggcgcatcggccacctcaggcgcggtaaaggtacagaaaatcagccgcgcctttttccatgccagcgatgtggtggtggtgccgaggatcttctcaaacagcgccagggtggaattgtggacatcccgcgctttcgcggcggcgatgatacgggtttccggcgtgacaacctcgcgcagcgcgcgcagctgctgctccagcagcgccagctgcttcggaaccttaatgagcaccagcgccggcgcggcaggcagttcgctcaggggatcctgaaaacgtacgctctcttcatcaatgccgttcatccgcaggttgtagcgggtcgccagctcagatacgtaggaatcgttgatgctgaccgggttgcgttccgccagcgcgcagcccagcgcgccaaagctgtcattgaaaatgagcgtcaggccgtcgacgtcattcacctgttgcagcagatattcatccgccgcttcccacgcctgaagcgcttcctcttcagcattcggcgggaaccgctctaatgtgaataactcaccgtttaactctacctggctcatcgcctttgtgcctccggaactctaaaacccgcgagtttatacgcaaacttcgcccagtagaatagagatgcgccgattatctccatctgccgggcgacggtccgttacgccgggaggtcgtcctgcgccaggcgcgacaggcgtttatcgtccaggctgtacttgctcatgataacaatcagcagcgccaccagtaccccggggaagacggtgaacagcagcgcgatcatctgcagcgcggagtcggtttgctgcgctgcgccgccaacgtagtcgccccatgccagcatatagcccaccagcgcgccgccgatggcgatccccagcttgatggcaaacaggtttgttgaaaaaacgatcccgctgagttttttaccgctgcgtttctcttccgcatcgataatatcggacagcatgctccactgcagcggcgtggcggccagctgaataatattgatgataatcaccagcgcaaagatagcggccacgttccccgccgggacgaagtacatgcctatcagcagcgccgcctcgatggccatcgagattttaaaccctttcactttatcaatatttttaaagataaacggggagagcatcgcccccagcacgccggaagccagggtggtggtcagcagcaggctgcccagatccgcccgccccataatattgttgacgtaatagagcgtggtcccgcctttaaacagcaccgcaatcaggttaacgacgttgagcgcgaagagaatgcgccagtccttgttggcgagcagggttttcagatcatcaagaatgctgctttgattgttgaccgcgatatccgtggtgtagcgctctttcgtcaggccgaagcagataaagaacagaatgatgctcaggcaacccatcacaatcatggtgtaaaaatagccgttttgcacattaccctgacccagccaggccaccagcggcagcgcggtcagcgagacaatcagaccgccgagcgtactgagcgcaaagcgccaggactgaagcgaaacgcgctcgcgggaatcgttagagatattattgatcatcgcgcaatacggaacgttaatcgccgtatagaccagcgataataaggtataagaaacataggcgtaaatcagcttgccggtatagccgaaatccggcgtataaaacgttaagcagcaaagtacgccaaaaggaatcgcgaaccataaaatataagggcggaattgcccatatttagtccgggtacgatccgccaccgcccccattaatacatcggtgaccgcatctaataccctgactgcgagaaacatggtccccatatgcgccggacttaaaccaaatacgtcggtataaaaccaggccataaacagcatcaccgtctgccagactaaattacagccggtatcccctaacccatagctaaatttttctttaatactgatacgggcagtgttcatcgcgcctccgccagaaagatcgttaatatttgtcctctgtacgttattgcttagggcttaccgattatgtataaatcatcctgttaaatataagaagagtgtactcgatgagtgatgaatctcccgttttcgaaaagatccccgtgggcgccggcgagctatttaccctgcgggtagataacataaacgatttcaatggcataaacgtagtcccgcattttcatatgatggacgaactgatgtggttccgagagtcggagggcagctattcgattggtgatgagaaatttacgataaaaaacaatactctgatttttgtccccgccttactgatccatgaaatgacgctcccggccgccgccagccacaagcgttatcttatgcaattcgaaaaagagtggctcgagggatacgacctgtcgctccccgccgcccactgcggtgcggtcgcttacctttccggcgaggaagccgagcgcctggagctgctgctgagctggtgcggcgagttcagcgactttaccgattcgctgtttcgctccctgatgcagagcgtactgctgcacgcctttaatagcctgaaagattccgtccccattaccgaacgcaccaaccatcgctatctgagcgagctgatcgaacttctgcaatctattgatgaaaatgaaaattttgagatgacaaccgaagaagccgcccgccgctgccggtggtcgaaatcctggttttcccgcacctttaaatccgccttcggcatcagcttcaaaaaatttatgctgctgcgcaaactgaatatcgctatcaatctactgaccaacaccgacctgaagatcagcgatatctcgcaaagcgccggcttcaccgacagcgcctacttctgcctcaagtttaaagagatgatgaacgacaccccgctggccttccgtcacaaagtcagaagcaccgatgccgtagggcgtcaggcggagaaataacgcgtttttgtgagccgcatcaccggataagtagacgtttattatataaatagccagagtctatatatccccgtcgctatcgcctatttacaatcatcgctatattttgcgcattaagggtaaatacgatgattcagaatcctgtttttaaaggttttaatcctgaccccagtatctgtcggcgcggcgatgattattatgtggcggtctcttcctttgaatggtttcccggtctgccagtttatcattcgagggatttaaaacattggcaactacttacccacgttcttaccgatgataataatccggatttaaaaaagctgccctccgccaaaggcatttgggcaccgagcctgacctggtgtgaagaggaaaagctgttctacgttatttatggcgtgatgaattccatgaattcacgttatttcgatgtagataactatcttattaccgccagtgaaatcaccggcccgtggagtgagccggtttatctccactctgccgggttcgatgcctccattttgcacgacaccgacggaaaaaaatggatcgtttccctggagtgggaaacccgcgaaggttacgaaaaaccgggcgccatttgcctggtggagtattcgccgcaaacgcgaagcgttgtcggctatccgcagcggatctggcgcggcggtaccgatcgcggctgtattgaagcaccgcatttgacgcgccgcggcgactattactacctgatggtcgccgaaggcggcaccggctacggccatgcggtcaccatggcgcgcgcaacgcaggtcgccggcccctatgaaggcgatccgcaaaaccccatcgtcacctcctggccggagaactttaacgcgcgccacgacgcagaccatctcaaaccacactacttcaatccgcaaacctatctgcaaaaagccgggcacggcagctacgtcgagaccccgacgggcgaagtctggttaactcatctttgcagcagacccttccgccaggcgctgcgctgcccgctgggccgcgagacggcgatacaaaagatggtatggagcgacgatggctggctgcgcatggcggccggggggaacctcgctcagcaccaggtggaagagtctaatctgccttctcagccgtttccggttaaaccagacagggatgattttgatgggcaagcgctggataacgccttctatgcgccgaggatccgctttcagcgctttaccagccttgagcgtaaagcgggttaccttgccttacgcggtcaggaatcgctgagctcgctgaataaagtcagcctgctggcgaaaaagctcacctcggtatacgccaccatcaccacgaaaatggatttcagcccggagatttatcagcatagcgcgggcctggcgatttactacgacaatatgaactatctgtttttgcataaaacctgggatgaagcctccggcgcagcgcagctggccattatttatatggacaacggtgagcgtcacgacgacccgcagaaaatctgccttacggagggggaaatctatctggcgatggcgattaatggccgggagatacagtgctcgtggtccgtggatggcgaaaaatacctcaacatcggcgcggtctacgacacctcgcgtttttccgatgaatacagccgctatggcgagtttaccggcgcgtttgtcggcatggcctgcgtggatagcatgctgcatcgtaaagaggcgctgtttgacttctttagctaccgggcggtcgaagacgcgataatcgagtaacgctgcctttctggcatcctgcccgcgcggggtgctagaatccgcggctgttgtcgctgaattacgcaaacaggccgcatgagcactttaacctatctccagggctaccctgaatccctgctggcgcaggtcaccgcgttaatcgaacagaaccgtctcggcgaggtgctgaaaaagcgctatccgcagggtcacgatatcaacaacgataaagcgctgtaccagtatacccaggatctgaagtcccgctttctgcgcggcgcggcgccgatcaataaggtgatgtacgacaacaagatccacgtgctcaacaacgcgctcggcctgcataccgccatctcccgcgttcagggcggcaagctgaaggccaaagccgaaattcgcgtcgccaccgtctttcgcgatgcgccggaggattttctgcggatgatcgtggtgcacgagctggcgcacctgaaggaaaaagagcacaacaaagcgttctatcagctgtgctgccatatggagccacagtaccatcagctggagtttgatacccgcctgtggctgacccagctttcgttagagcgttctgcgccatagcgcactggttttgtcatgatggcgtgctacagtgacgaaaggtcccttttacggagttcgtcaacgtttatgatacgtttcgcagttgttggcacaaactggataaccaagcagtttgtcgatgccgcccatgaaaccggcaaatataaactcaccgccatctactcccgcagccttgagcaagcccaggccttcgccagcgactatcccgtcgaacatctgttcacttcgctggaagatttagcgcaaagccctgacgttgacgcgatctatatcgccagcccaaactcgctgcacttcccgcaaacccgcctgttcctgcgccataaaaagcacgtgatttgcgaaaaaccgctggcctcgcacctgcaggaagttgaagccgcaatcaaaacggcgcgggaaaataacgtggtgctcttcgaagcgttcaaaaccgccagcctgccaaatttcctgctgcttaaacaatcgttcgacaagatcggcaagctgcgcaaagcctttattaactactgccagtactcttcccgctatcagcgctatctcgacggcgaaaatcccaacaccttcaatccggccttctctaacggctcgatcatggatatcggcttttactgtctggcctccgcggtggcgctgtggggcgagccccgcgcggtgcacgcaaccgccagcctgctggagagcggcgtcgatggccagggcacggtcgtactcagctacggggatttcgatgtcaccctgcaccactcgaaggtcagcgattccgccatccccagcgaaattcagggcgaagccggcgcgctggtaatcgaaaaaatctccgaatgccagaaagtgtgcttcgtgccgcgcggcggcaagcctcaggatctcacccagccgcagcatatcaatacgatgctgtatgaagcggaggagttcgctcgcctggtcgaagccaacgaggtggctcatccgggtctggaagtgagccgcatcacggcgaagctgctgagcgaaattcgtcgccagaccggcgtggtcttcccggcggatagtcaacctgtggcgtaaagctgtgtaaatggtccgtcggcctccattgacgccatttataacctgtaatactttgttacgcgcaaaggggagtaacttccttgccggccgatcgtcattacgatgcgtgaaaaaccgcatccggtcgccgggcaacagattcttgttgtaagtgagaccttgccggaaggcgaggtctatgcataaaagcgcagcggctgccgtcttccgacgtcagccgttttgtttttatgtaaggaaaatagtaatgaatactgtcggcacaccgttgttatggggcggattcgcagcggtcgtggtcatcatgctggctatcgatctgctgctgcagggacggcgtggtgcgcatagcatgaccatgaagcaggccgctggctggtccattctctgggttaccctctcgctgctgtttaacgccgctttctggtggtatctggtgcagaccgaaggtcgcgccgtggccgacccgcaagcgctggcgttcctcaccggctacctgatcgagaaagcgctggccgtggataacgtcttcgtctggctgatgctgttcagctactttgccgttccgcctgcgctacagcgcagagtgctggtttacggcgtactgggcgcgatcgtgctgcgtacgatcatgatcttcgccggcagctggctgatttctcagtttgaatggctgctctacgtcttcggcgcatttctgctgtttaccggcgtgaagatggcgctggcgaaagaggacgattccgggatcggcgataaaccgctggtgcgctggatccgcaatcatctgcgcatgacggataaaatcgaaggtgaacgcttctttacccgcaaaaacggtgttatctatgccacgccgctgctgctggtgctgattctggtcgagctgagcgacgttatctttgccgtcgacagcattccggccatcttcgccgtgaccaccgatccgtttatcgtgctgacctcaaacctgttcgcgattctcggcctgcgcgcgatgtatttcctgctggcgggcgtcgcggagcgtttctccatgctgaagtacggcctgtcggtgattctggtgtttatcggcatcaagatgctgattgtcgatttttaccatattcccatcggcatttcgctgggcgtggtcggcggtattctggtgctgacgctgctgatcaacgcctgggtcaataagcagaacgatcggaaaaaacagctgcagtaagacgtaaacggccgggtgaagacccgtttcacccggtcggcaacgtttgccgcgcattattcttactcatgtcacaaaatagttaatacatagttaaaaaataagatcccagcgcgataaacagcattttacccttccccagaagcgttctttccgtatactcaaccaggcaaacatctatttacatccggacataaacgttacaaataatacgtagccgggacggacagcgacatcactggaaggaatgaattatggcaaccccatcaccccgatcgaccctgctacggcgactggctcagggcagtctggtcaaacaaattttaattggtctggtactcggcgtgctgctggcgacggtctcaaaaccggccgccgtggcggttggactgctgggtacgctgttcgtcggcgcgctgaaagcggtggcgccggtgttggtactgatgctggtcatggcctctatcgccaaccatcagcaggggcagaaaaccagcatccgcccgattctgttcctctatctgctggggacttttgccgccgcgttaaccgcggtgctgttcagcttcctctttccgtcaacgctgcacctgaacgcggcggcagagagcatcaccccaccgtcgggtatcgtcgaagtcctgcgcgggctgctgatgagcatggtttctaaccccattgacgcgctgctgaacgccaactatatcgggattctggtatgggccgtcggtttaggattcgcgctgcgccacggcaatgaaaccaccaaaaatctgattaacgacatgtcccacgcggtcacctttatcgttaaagtggtgattcgctttgcgccgctgggtatcttcggcctggtcgcttccacgctggcgacgaccggttttgaaaccctgtggggctacgcccagctgctgctggtgctggttggctgtatgctgctggtggcgctggtgattaacccgctgctggtgttctggaaaatccgccgcaacccgtatccgctggtgatgacctgcctgcgcgaaagcggcgtatacgccttctttacccgcagctccgccgccaacattccggtgaatatggccctgtgcgaaaagctgaatctggatcgcgatacctattcggtctctattccgctgggcgcgaccattaacatggccggggcggcgattaccatcacggttctgaccctggcggccgtacacacgcttaatgttccggtcgatctgccgaccgcgctgctgctgagcgtggtcgcctcgctgtgcgcctgcggcgcttccggcgtggcgggcgggtcgctgctgctgatcccgctggcctgtaatatgtttggtatcccgaacgatatcgccatgcaggtggtcgccgtgggcttcatcatcggcgttctgcaggactcctgcgaaaccgcgctgaactcctcgaccgatgcgctgttcaccgccgccgcctgtatcgctgaagacgaacagctggcaaaaaacgccctgcgcagttaatctctcctctcccctccgctaacgcgcggaggggttctctttctgccccgccttttccgctttaaacggatcgataccgcgcttttgcatccgccggaatcggatgatattcagaccgttcatcaacaggaagctgccttcaatcagggtgccgccgatcgagcccagccaaaagttgtggatcacccagcaggcggtcgaacaccacatgacgcagcggacggttagacccgagcagcgaaagagcgcccaggtactggccagggtgccaataatcggcagcagctccatggcgtgctgcagcttcgccagccccagcaccagggtgagcacgataaacagagccatcacccacagcctgcgagtgcgcatggagatcagggtgcggacggtattcagctcggcgctcattcccgccggccaggcgcccatcaaaaagaaatgcacgccaatggtggcgctatagacggccagctgtagcttaaagcgacgctcatcgcggttgaaaaaggtcgtaatcccgatcagaaaggcgataacgccgacgccctgggcaagccaatacgcggtcatgaaaagtccttatatacccgtcatacttcaagttgcatgtgcgttagccgcgttcgttcaccccggtcacttacttcagtaagctcccggggattcgctcacttgccgccttcctgcaactcgaattatttagggtataagacaaaacggcgcatcatactctgaaacgccgcttttgaaacgactccatttattactcaataagatttcacgccgcagcggtggtgcgaaagatgacgagtaattaaagggtgacgccgcttttgaatatcgccagttcgcggaaatcattacgctcattgcaggtctgcttaccgttcgcaaaggccacaatggtatcgacaaactcctccagcagctgcggcatcgctttaccgtgaatcagctgaccggcatcgaagtcgatccagtgttttttcttcgccgccagttcactgttggtggcaattttcaccgttggcacaaaaccgccgtacggcgtgccgcgaccggtgctgaagagcaccatatggcagcccgcgccggccagggcgctggtcgcaaccgcatcgttgcccggggcgctcagcaggttcaggccgtgcacttttagccgctctccatagcgcaggacgtcgaccacctggctggagcccgctttctgcgtgcagcccagcgacttatcctccagcgtcgtgataccgcccgctttgttgcccggcgatggattctcataaatcggctggtcatgagcgataaagtactgtttgaaatcattaaccatcgtcaccagcttgccaaacgtctcttcatcgcgacagtggctcatcagcagctgctcggcgccgaacatttccggcacttcggtcagcacggtggtgccgccgttggcaatcagataatccgagaagcggcccagcatcgggtttgcggtgatgccggacaaaccgtcagagccgccgcactcaagaccaaacttcagttcgctcagcttacccggctcgcgcttgtcgtggcgcatcacttcatatagctggcgcagatgctccagcccggcttccacttcgtcatcctggtgctggcagatcataaagtggacgcggtcagggtcgaactcgcccagcgtttcgcggaaggcatcaacctgattgttttcgcagcccaggccgaccaccagtaccgccccggcgttcgggtggcgcaccatattttgcagcatggtacgggtgttgatgtgatcgtcaccgagctgtgagcagccgtaggtatggctgaagagatgaacgccgtcgataccttccgcgtcgttggtttccttcagaaaacggttctgcatctggcgcgccatggcgttaacgcagccgacggtcggcaggatccacagctcgttgcgcaccccgacttcaccgttggcgcgacgataaatctggatgtcgcgatccgccggctgcgcggcgggttcgatcagatccggttgatagctgtacgcgtcgagatcgcttaagttagtacgcgtattatgggagtggatatgttcccccggcgcaatatccgccagcgcatgccctatcggcagaccatacttaatgacgttgtctcccttcgcaatgccgcgcagcgtaaacttatgcccgcgcgcaatatcctgcgccaacgtgaccgtatcgccgtcaatggtgactaccgtgcctgccgccatatccgccaacgctaccgcgacgttatcgtgcgaatggattttaatgtattgcatatcaaccgacctctggtcttagttcagttcaatggcgaagtagtcacgcgcattgttaaagcaaatgtttttcaccatctcgcccagcagctgaatatccgccggcgcttctcccgcttcaacccagcggccaatcatctggcacaggatgcggcggaagtattcatgacgggtgtaggagaggaagctgcggctatcggtcagcatcccgacaaagcggctcagcaggccaagctgcgccagctgggtcatctgacgttccataccgtctttctgatcgttgaaccaccagccggaaccgaactgcatcttgcccggcatgccttcaccctggaagttgccgatcatggtacccagcacttcgttgtcgcgcgggttcaggcagtagaggatcgttttcggcagcaggttttcttcgttctgtttgctgagcagtttggacagctcttccgccatcgggcggtcgttaatggagtcaaaccctacatccggccctaacagtttgaactggcgcaggttgttgttgcgcagcgcgccgatgtggtactgctgcacccagccgcggcgggcgtattccgcgccgaggaagaccagaaccgccgttttgaactgcgcgacttcatgctcgctgagggcttcacccgccagacgacgcgccaggatgctatccagttcgctttcgttggcttcggcgaacagcaccacgtcgagcgcgtggtcagaaactttacaaccgtgagcggcgaagtgatccagacgtttggtcagcgcggactggaggtcggcaaagcggcgaatgtcggtgtcagacacttcgcccagcttcgccatgtagtcgttgaaggtggcctgttcgatattgaaggctttgtccgggcgccagctcggcagtactttcacggagaatgaactgtctttagcgacggaggcgtgatgttccagcgaatcgaccggatcgtcggtggtgccgaccattttcacgttcatctgctgcatgatgccgcgagcggaaaagctatcctgcgccagcagatcgttgcactgattccagatttcatccgccgtcgccggagagagaaccttacctgtaataccaaaaggacggcgcagctcaagatgcgtccagtggtataacgggttaccgatggtatgcggtacggtggccgcccaggcgtcaaatttctcgcgatcggaagcatcgccggtgcacaaacgctcggctacgccgttagtacgcatcgcgcgccatttatagtgatcgcctttcagccagatgtcatacagatttttgaaacgataattctccgcgatctgctgcggcggcaggtggcagtgatagtcaaaaatcggctggtctttcgcgtaatcgtggtacaggcggcgggaaaactcggtatcaagcagaaaatcttcggtcataaacggtgtcattttcgtgtcctcttcgccccctggggagcccatcagatgattgactataatgctgacaaagttatcacaccaatttccacaggccgaagtatttttcgtgagttagatcaataaacgatgacaaaaaaagtaccatgaaaggagtaaacgccccgccagagcgcgccagctctggcctttttcgcatgaacgaatgcccacacaaactttcccacttttgtgacgtcactcaacttttgaagttgtatgacaagttatcttgctgccgtcgaaacatataaaccgacggaatgcattaccgacgaactatcacgtcggatttaccggtatggacaccgaattagacacaacagttaatggcaaggttcgggccatacgaggtttcctctcctgaaccctccgtttcaccttcttcgcctcagttacagggctggaagatagccgcacccgctgcggatatataacaaacgatgaggtttacatgcgtaaaattaaagggttacgttggtacatgatcgcactggtgacgttaggtaccgtgctggggtacctaacgcgtaacactgtggcggcagctgcgccgactctgatggaagagttacacatctccacccaacagtattcctatatcatcgcggcctattccgctgcctacaccgttatgcaacccgttgccggctacgtgctggatgttttaggcactaaaatcggctatgccttctttgctatcgcatgggcggtgttctgcggctctacggcgctggcgggaagctggggcggtctggcgctggcgcgcggcgcggtgggtgccgccgaagcggcaatgatccctgcgggcctgaaagccagctccgaatggttcccggcaaaagagcgttcaatcgccgtcggctacttcaacgtcggctcctcgatcggcgccatgattgccccaccgctggtggtttgggccatcgtgatgcacagctggcagatggcgtttattatctccggcgttctgagctttgcctgggcgatggcgtggctgattttctacaaacacccgcgcgatcagaaaaaattaactgaagaagaacgcgactacattatcggcggccaggaatctcagcatcagaccaacaacggcaagaaaatgtcgccgtggcagattctgcgcaaccgtcagttctggggtatcgccctgccgcgtttccttgccgagccggcgtgggggaccttcaacgcctggatcccgctgttcatgtttaaagtctacggctttaacctgaaagagatcgcgatgtttgcgtggatgccgatgctgtttgccgatcttggctgtatcgttgggggctatctgccgccgctgttccagcgctggtttggcgttaacctcatcgtttcgcgcaaaatggtcgtcaccctgggcgcggtgctgatgattggcccggggatgatcggtctgttcaccagcccgtttgtcgctatcgccctgctgtgcgtcggcggctttgctcaccaggcgctgtccggtgcgttaattaccctctcttccgacgtgtttgggcgtaacgaagtagcgacggcgaacggcatgaccggtatggccgcctggctggcgagcacgatgtttgccctggtggttggcgcgctggcggacactatcggctttagcccgctgttcgccgtgctggcggttttcgatgtgctgggcgccgtggttatctggaccgtgctgaaaaataaaccggcggatgacgacacgacgccgctggaaacgagtaaacccgccacgcaaagttagacgcacgcgagttatcctctccgaaagccgccttgattaaggcggctttttcgtctcttcttatggtgagaagcgcgtaaaagtggtataacaaatccaatattgtcgccatctcccgggagcgaatatggaaatcactgaatcgcgtcgtctgtatcagcagcttgctgctgagcttaaaacgcgcattgaacaaggtgtctaccttgtgggcgataagctacccgcagagcggtttatcgcggatgaaaaaagcgtaagtcgtaccgtggttcgcgaagccatcattatgctggaagttgaaggctacgttgaggtccgcaaaggctccggcatccacgtcatctctaatcatccaaaacatcagcaaattgccgacgaatcgctggaatttgccaattatggtccttttgagctgttgcaggcccgtcagctgatagaaagcaatattgccgaattcgcggcgactcaggtgaccaagcaggacatcatgaagctgatggaaatccaggaaaaagcgcgtaaagagaagtgcttccgcgattccgaatgggatcttcagttccatgtccaggtcgcgctggcgacgcaaaatacggcgttagccgctatcgtcgaaaaaatgtggacccagcgcgtgcataacccgtactggaaaaaactgcacgaccatatcgactcacgtaccgtcgataactggtgcgacgatcatgaccaaattcttaaagcgctgattcgcaaagatccgcatgcggctaagctggcgatgtggcagcatctggaaaataccaagctgatgttgttcaacgaaaccagcgacgactttgaattcaatgccgatcgctacctgtttgccgataatcccgtggttcatctcgatacggccgccaacggcgtaaaatagacgttctccttctgcagggcagcgattcctccgctgcccgcaaagcctcagggtaagcaaagcatatatagtgtcagcctgtgtaaatacactcgccaccctccttcgcaatcagcaaaatcagaatgcaacaaactgcaatttctatgacgtaaagtcagcgggtttgttacaattagatgcattttgtcgttctgagagtaagctttggcttacttcacttttaaacagggaaccgttcagagcgcagtagcgaccataatctaataaaaagctatgtcgccgtgcatataccgcgttcagacgtgccgttaaccgatgtaccaggaatcgtgaatggaactattaacccaattattgaacgccttgtgggctcaggattacgaaactctcgctaatccctccatgattggcatgctgtactttgtcttatttatgattttgttccttgagaacggtttgctgcccgccgcctttttgcccggcgatagcctgcttgtgctggtcggcgtcctgatagctaaaggcgcgatgggctttccggaaacgctgctgctgctcaccgcggcggcaagtctcggctgctggctgagctatattcagggccgatggctgggcaatacgcgaatcgtacaaaactggctatcgcacctcccttcgcactatcatcagcgcgcgcatcacctgttccataagcacgggctttccgcactgctgattggccgctttattgctttcgttcgtacgctgctgccgaccatcgccgggctatcaggcctgagcagcacacgcttccagttttttaactggatgagcgggctgctgtgggttctgattctgacctcgctgggatacctgctggggaaaacgccggtattcctgaagtatgaagatcagctgatgtcctgcctgatgctgctgcccgtcgcgctgctggtgtttggcctgataggttcgctgattgtcctgtggaagaaaaaatacagaagccggggctaacaatggagatgacacgctcctctctgcgtcagataagctgggtgctgggcggttcgctactcctgtgcggcctgttctggctctggctcaccgtgcaacagcaggaatccacgctggctattcgtcccgttagtcagggtatcagcatgccggacggtttttccgtctggcaccatctcgacgctaacggtatccgttttaaaagcattacgccgcagaatgacggtttgcttatcaagtttgactccagcgctcagggcgctgcggcaaaagaagttttgggccgcgctctaccgcatggttatattatcgctttagtggaagacgatgattcgcctaccgcctggatttcgcgcctgcgcgatacgccgcacagattcgggtaatccacgaaaattccgaatatattcaccctgtttggtgatttcccggtttacttactatcattaagtttgcgggcgtcaccagactcacgttactcaactggataggggatatcctgagatattcccccacacaatggaaggtcgtatccatgaaacaccgcatcgctttgatcctggttctgtcatcactgagcgccagcgcctttgccatctccccttgccaggaaaaagagcaggatatccagcgggagatcagctacgcagaaaagcatcataaccagcaccgtattgacggtctgaaaaaggcgctgagcgaagtaaaagcgcactgcagcgacagccagctcaaagccgatcaccagaaaaaaatcgccaaacagcaggaagaaattaccgaacgtcggaacgacctgcgcgaagccgaacagaaaggcgatgctgacaaaatcagcaagcgtcaacgtaaacttgatgaagcgcagcaggaactgaaagagctgcagtctcgcgagtactaatcgattaagcaagaccaatatggaccactttaacaggagataaacatggctaaagataacgttgcagaagacctgcgtgcggaactgaagacgctggctgataccctggaagaagtgctgaactcctccacggataagtcgaaagaagagattggtaagctgcgcagtaaagccgaaagcgcgctgaaggaaagccgtgctcgactgggtgaaaccagcgatgctctcctgaagcaaacgcgagaaaccgctgcgcgtgcagatgaatacgtccgtgaaaacccctggaccggcgtgggaattggtgctgccgtcgggctggtactgggtgtcctgctgacgcgtcgttaattatggcgaactctaaaagcacgcaaggacctgggcaaagcgttttcggcatcggtcagcgaatagtcactttgctggtcgagatggtggaaacgcgcctgcgcctggtcgtcgtggagctggaagaggagaaagccaatctcttccagctgttcctgatgctcgggctgacgctgctgtttgccgcgttcgggctgatgagcatgctggtgctcatcatctgggccgtcgatgcgcagtatcggctcaacgtgatgatcgccaccaccgctatcctgctgctggcagcgctcattggcggtatctggaccttacgcaaagcccgacgttcaacgttcctgcgcttcacgcgtcaggagctggctaacgaccgcgcattgctggaggacgataagccatgagccgcgaacagcaggaacgcgaacgacaaaaagcgcttttgctgcgcctgatccaacagcagcggctggaccttagcgccagccaccgccactggattgaagcgaccgcgcccattgatcgcggctggaacaccttcctcaatctgcgttcatgggcgatggtcggcagcggcatcgtagcaatatggtccgttcgccatccgcgctttttgatgcgctgggcaaagcgcagcctcggtatctggagcacctggcggatggcacgcaatctgctgcgtcaggccacctcgcgctaaggctaatgaccgggtccggcgccagccgccgcccggcatccctcaatccccactgtccccgtcaggtttgcccctcttcttgctcaccagcagaccgctttcgcctttcagcgtctgccgtcattttgcgcagcaccgcctgtacgacccgctacagccccacttacattcatgtcctttatcaataattactcagaaactttgaagaagatctacagttttccttgctaacaatcacatctcatcctcgctaatatcctctccatcgacagcaagcccgcgtaactacgcaggattgcaccaaaaaacaaaatcgccgccctttgggttttctggagtaagaaatgaaaaaattagaagatgttggtgtactggtagcgcgcattctgatgcccattctgtttatcaccgcaggttggggaaaaatcaccggttatgcgggtactcaacaatatatggaagccatgggcgtccctgggtttatgctgccgctggttatcctgcttgaattcggcggcggtctggcgattctgttcggtttcctgacccgcaccaccgcgctgttcaccgcaggcttcaccgtgctgaccgcgtttctgttccacagcaactttgctgagggcgtgaactcgctgatgttcatgaaaaacctgagcatcgcaggcggcttcctgctgctggctatcaccggtccaggcgcctttagtattgaccgcgtcctgaataaaaagtggtaagcgcactatactagtaaataaaaaagcgaggggacttctcctcgcttttgctatctgaaggaggaaataatgggacaattagttgacggcgtctggcacgatacctggtatgacaccaaatccaccggagggcgatttaagcgttctgtgtccgcctttcgcaactggctaaccgccgacggcgcgccgggcccaagcggcgaagccgggttcgctgcggaaaaagaccgttaccatctgtacgtttctctggcctgcccatgggcgcatcgcaccctgatcctgcgcagcctgaaaggactggagccgtttatctccgtctccgtggtcaaccccctgatgttcgagaacggctggactttcgacgatagcttcccggcagcgacgggcgataccctctaccagcacgaatttctttatcagctttatctgcatgccgatccccactacagcgggcgcgtcacggtgccggtattgtgggacaaaaagcagcaaaccatcgtcagcaatgagtcggcggaaatcatccgcatgttgaataccgcatttgacggactgggtgcccgcgctggagattactacccgcctgagctgcgcgcgcaaattgatgagctgaacggctggatctatgacaacgtcaacaacggggtctataaagccggattcgccaccagccagcaggcctatgacgaagcggtcgatggggtatttacgtctctggagcgtctggaacaaatccttggtcaacaccgcttcctgaccggtaaccagctgacggaggccgatattcgtctgtggaccaccctggttcgtttcgacccggtgtatgtgacccactttaaatgcgacaaacgccgcatcagcgattatctcaatctttatggcttcctgcgcgatatctaccagatgccgggcatggcggaaacggtggattttgcccatattcgcaaccattactaccgtagccataagacgatcaacccaaccgggattatctccgtcggcccgcagcaggatcttaacgaaccgcacggccgcgatcttcgcttccgctaatccgttgggcgccatttaccgcgcccaataattcacaaaacaaatatttaccagcatttcattcacgtctattcttatttcgatcgctttaaaaacaagtgattgacggttaatcgaggcgtaaaaatggactggtatcttaaagtattaaaaaactacattggatttggcggccgcgcccggcgcaaagagtactggatgtttattctggtcaacatcatcctgaccggcgtactcagcattattgataaaatgctcggatggcagcgcgccggaggggaaggcattctgacgaccatctatggcgtgctgatattcttaccgtggtgggcggtgcagtttcgtcgattgcacgacaccgaccgctcggcatggtggctgttattgctgctgatccccgtgatcggctggctggtgatcctggtcttcaattgccagaacggcactcccggcaataaccgcttcgggccggacccgaaaccgacctcttactgaccatgcgcccctcgtcaaaaaggggcgcattttgttttatctggccataaatagcttcgggatttcccgcagacaccatgattttgcctcacccatgctgtcccggcgccaggccataataatgtcgatctcgttgctgtattccgggctgaccacccgcaggcgcccttcggcaatatcccgctcaaccagcggatagggcatcgtggcgacgcccaaccctgccagcagcgcctggcgtttatcttcgatcgagctcacggttaatcgcggctgtttatcaagcagctgcaccgtcagcaccggacgttcgcgggcggtgtccgccaccgccacgccgcgatacttcacgcgcgtgacttcagaaagcggctcaggctcgaggtgaatgggatggtcgggggcggcaacgtagacgctcataaccgagtagagcttacgggagttaatttccgaggaggaacggaaatgcatatccggcgcaacgacaatatccgcccgcccctgctcaagacgctcccatgctccggccagcacttcggtaataatcgacagctgggtgttcgatttggtcgcgagcttttcaattagcggaaacaggtcggtggtaggtaccagcgcctcggtgacgatggtcaggtgcgtttcccagccgcgcgatagcgcttcggcatcggttgtcagcttatccgccgcttccagcagaacgcgcccgcgctcgagcagcattcggccaacgttggtgaattttgttcgatgacctgaacggtcaaacagaacgacatccagctcttcttccagcttttgcatggtatagctgagcgctgaaggcacccgaccaagctcatcagccgccgccgcaaagcttccgcgccggtcaatcgcatccataacgcgtaacgcttccagcgttaatgctctctctttagccatcgttctctcattcaggaaatttgaacataccgggcagaatatctggctaacaatacagcgtccatacctttaccattgatttagtgtaaagagaggtcaagaagatgattacaacccgaacagccaaacagtgcggtcaagccgacttcggctggctgcaggcccgctacaccttttcctttggccactacttcgacccgaaattgctaggttacgcgtcgctgcgcgtgctcaaccaggaagtcctggcgcccggcgcgtcgttccagccgcgtacctatccgaaagtcgacattctgaacctgatactggaaggtgaagcggaataccgcgacagcgatggcaaccatatccaggctaaagctggcgaagcgctgctgatatccacccagcccggcgtgagctacagcgagcacaacctgagcaaagagagctcgctgacgcgaatccagctgtggctggacgcctgcccgcagcatgaaaacccgctggtgcaaaaaatcgctatcgccgagggagcgcagcagctgctggcttcgccggacggcagccagaacagtctccagctgcgccagcaggtatggatccaccatatcaatctggcgaaaggcgagcagcttaacgtgcagctccacggcccgcgcgcctacctgcagtcgattcacggcacggtacatgcgcgagtgcaggaagaagagaaacaggctttgacctgcggcgatggcgcgtttattcgtgacgaagctaacattaccctcgttgccgatacgccgctgcgcgctttgctgatagatttacctgtgtaacaacggcagtaagggagtgtgtcagtgggcaagaagaaaacaaaaaaagcggtgctggcagcatcgcagccgcagccagaaaccatgacaacggttagctttggttatgaagagatgttgagcgaactggaggcgatcgtcgcagaagcggagatacggctccaggaagaagaaagcgtcgcctgacgtcaatatcggccccggccggggccgatagatttactcactcagcgcctgagctaaatctttttggacctgcttacgctgttctggcgtcaggacctgattcacatcaaaatagtacttcacgcgataatagcggacctgctgttcgactttactaaacgccgccagctgatctttgaccgctttttcattccattttccggaatcaatcacatcaaataatacgccgtctttaatatccttctgggagatctgctgaacgtttttttccagctgctggtgcaggcttttaattttcgttacctgatcctgggtcaattttaagtgttggacaatcggatcctgcgccggggctggcgcagcgttaacatccgcagcctgtgccgccattgagaagcccgtagcgaggacggttgtcactgcaatgcgagtcattaatttcattttttgttttatcctgattaattatcaccgatgtggctggctattatttttcataagccgatgacgaaatgtaaaaaatagttcgcataaatgtagttaaatcaggagatacataataaacatgaatgctataattgaattcatttattttaaatatattaattaagcgagaaggacgcataaccgcatgagtcataatgcggttgatggcagacctgtttcctccattgtgccgctttcttttggggtatagcgtcgtggactggcattcatctgccctgtgtttcaacctgccgtatgaagcaaaaacccccgccattgctgacgagggttttctttgaatgaggaagctgaccgttaagccgggttctgtcgtggacagtcattcatctaggccagcaatcgctcactggctcaagcagcctacccgggttcagtacgggccgtaccttatgaacccctatttggccttgctccgggtggagtttaccgtgccgcgaactgttaccagacgcgcggtgcgctcttaccgcaccctttcacccttacctgatcccacttgcgtgggccatcggcggtttgctctctgttgcactggtcgtgggcttgcgccccccaggcgttacctggcaccctgccctatggagcccggactttcctcccctccgcccgtctcccccgaagaggacgacgacgaagcggcgactgtctggtcagcttcggcgcgcagtatagagggtttaccgacggttgtcatccttccgtcgccatcccaacctgcaatgtcgccgcaatattacgcgacgcatgataaatattgtccgccgcgccgcgaaacgcctcttcgagcgtcgttacgctggtcagtacgctaaacaccgcatcaatcccatactggtgaaccacgccgacgtcccgggtcagactaccggcaatgccaattaccggcttatgatactttttcgccacgttcgccacgccaaccggcactttaccgttaatactctggctatccagccggccttcaccggtcaccaccagcgaacaatcgaggatatgctcttccagattcagcgcctgggtcacgatttcaatcccgctgcgtaattcagcgttcaggaacgccatcagcgctgcgcccataccgcccgccgcgcccgcgccggcaacctgcttcacatcgacatgcagatcggccttaataacgtccgcatagtgcgccaggttgctgtccagctcgcggatcatcgcttcggtagcccctttctgcggaccaaatatccttgatgcgccagtatcgccagtcagcggattggtgacatcgcaggcgacccgaatagcgcaatcatgcagtcgcgcatcaagaccggagagatctatcgaattgaggctacacagactaccgccgccgttgccaatctccacgccgttggcatcgcagagacgcgcgcccagcgcctgaaccatccccgcgccgccgtcattggtggcgctgccgccaatgccaatgatgatatttttcgccccatgatccagcgcctgcaaaatcagctcgccggtaccgcgcgacgtcgtcaatagcgggttacgctgagcgggcggcaccagccccagcccgctggccgcagccatttcgataaacgcggttttgccgtcgccggagagcccccagcaggcattaaccggaacacccagcggccccgtcacgcaggcgctcatttcggttccctgcgtcgcggcaatcatcgcctcaacggtaccttctccgccatcggcgagaggaaccttcacgtagagcgcatcggggaaaatttcccgaaaacctttttctatagcctgagcaacctcggtggccgagaggctttctttataagagtctggggcgattacgattttcatagttatgtagcctgacagtgccgcgcgaggcaagaattacagggcgcgcatccgcgcccttcttgttagcgagtgacttccactttcgccagtttttcgtagtagcatgcaagcgcgctgtggtcggcggtacccaaaccgtcggcgcgcagcgcctgcatcatctccatcaccgcggcggtcagcggcagctgggcgcccacgccgtgagaagtgtccagcgcattcgccagatctttgatatgcagatcgatacggaaacccggcttgaagttgcggtccatcaccattggcgctttggcatccagtacggtactcccggccagcccgccgcggatggcctgatataccagatccgggttcacgcccgctttggtcgccagcgtcagcgcttcggacatcgccgcaatgttcagcgccacgatcacctggttggccagcttggtcacgttgcccgcgccgatctcgccggtatgcaccaccgaacccgccatcgctttcagcagatcgtaatatttgtcgaaaatcgctttatccccgcccaccatcaccgacagcgtaccgtcgatggccttcggttcgccgccgctgaccggcgcatccagcatatcgacgcctttcgctttcagcgcttcgctgatttcgcggctcgccagcggcgcgatggagctcatatcgatcagcacggtgcccggcttcgcgccttcaataatgccgccttcacccaacgccacctctttcacgtgcggggagttcggcagcatggtgatgatcacatcgcactgctcggcaatcgctttcgctgacgcggcggtttctgcgcctgcggcaatcacttcggcaatcgcttccgggttacggtcagcaaccaccaacgagtaacctgccttgaggaggtttttactcattggtttacccatgataccgaggccaataaaaccaactttcattgtcatgtctttatctctctagtttcggtggtggttatttcttaaaggagtcagccagcttctgcgtggcagaacggaaaacgcccaggtcgctgccgacggcaacaaaggtcgcgccccattccagatagcggcgcgcgtcggcttcaaccggcgccagaatgccgctcggcttaccgtgctttttcgcgctggcaaaaatgtgctggatagctttctgcacttccggatgggaagcattgcccagatggcccagcgcagcggccagatcgcttgggccaacaaaaataccgtcaacgcccgtcgtggcggctatcgcatcaacgttatccacgccctgctggctctcgatttgcacgaggatggtgatgttgttgttcgactgcgcgaagtaatccggcacggtgccaaacatattggcgcggtgcgagacggatacgccgcgaatgccttctggcggatagcgggttgaggcgacggcgttaaccgcctgctcttccgtttcgacaaacggaatcaggaagttataaaaaccgatatccagcagacgcttaataatcaccggctcattggtcggtacgcgaacgaccggcgcgctggcgctgcctttcagcgccatcagctgcgggataaaggttgagatgtcgttcggcgcatgttcgccgtccagtaccagccagtcgaaacctgccagacctaaaacttcggtgctaatcgggctcgccagcgcggaccagcagccaatctgaacctgatgcgccgccagggccgccttaaatttgttcgggaagatatcgttgttcatcgtttataccttgtcacttaaccgttaattatttctgcagttccatgcgtttgatgtcgccgaccacaaacagatagcaaaccatcgccatcagggctgagcatccgacgaagaccagcgctgcgttgaatgagtgcagctcgctcaccaggtaaccgataaccagcggggttacgatggaagcgacgttaccaaatacgttaaagacgccgccgcacaggccgacaatctctttcggcgcggtatcggaaatcaccggccagcccagcgcgccgaaccctttaccgaagaaagccagcgccatcagggtcaccaccagcgcggtgttatcggtgtagttacacagaatgatggtggaagccagcagcattccgaggacgatcggcagcttacgcgccacggtgatggaaaaaccgcgtttaatcagatagtcggagaacaccccgcccagcacgccgccggcaaaaccgcacagcgccggaatcgatgcgaccagacccactttcagaatcgacatgcccttttcctgcaccagataaatcgggaaccaggtgaggaagaaccaggtgatggtattgataaaatattggccgaagaatacgcccagcatcatgcggttggtcaacagctgcttgatatagtgcagtttaggtccgctggccgccgtgctgccgggctttttatggtccatatcaacgacggcgccgttctcggagataaacttcagctcctcctgcgtcatgcgcgggtggtcggtggggttgtggatcagttttatccacagaccggtcagcacaaagccaatcacgcccatgacggtgaagacgtgctcccaaccccaggcgaaggtcagccagcccagcagcggcgagaacagcgccagggagaaatactgcgcggagttaaagatcgccgatgcggtcccgcgctctttcgtcggaaaccacgccgcgacgatacgggcgtttgccgggaaagatggcgcttcagagaaacccagcataaagcgcataaaaaacattgagatacccgcccacgccagtggaaacatatccacaaagccttgcaggaaggtaaacagcgaccagaagaacaggctgtaagagtagactttcttcgagccaaatttatcgagcagccagccgccggggatctgcatcagcaggtaggcccagccgaaagcagagaaaatatagcccatcgagaccgcgctcagctgcagctctttcgccacctctgtaccggcgatcgagagcgtcgcccggtcggcatagttaacggcggtaacaatgaaaatgatcaacaaaattaaatatcgagttggcacttcctttttctgttctatcgttgcatccagactcatctaatattcctcaggtacaacacaccttccattatttattttggtgtgattatttattattcagaaatcaatatcagaaggtatcgatttacttatccggcgcattgcaagcatgactcagtataatcagcttgcgagcgttaaacactgtgcatataacctgtaaatggcgtttaattatcgttattgttgtgcaaatgcaataatcagtgggcgctgttccacagttccagcgatttccctctttaacgtattcgcccgcgcagcaatgggtgatttagatcacattttcagattcaaacacctgacattctctatttcacaaatctgcacatcagaaattgaatataccctaaatatttcgagttgcatgaaggcggcaacgcagggaatccccatgagcttactaaagtaagtgactggggtgagcgaggaaatccagcgcacatgcagcttgaaatatgacggatataaacgttttattttattattcgcaccttgctggagaatactggacaatggctgacattgaaattagacaagaatcgccaacggcgttttatataaaagtagacgaaacggataacgtggcgattattgttaacgatcgaggtttaaaggccggaacgcgtttccccgacgggctcacgctcgttgaacatatcccgcaaggccacaaagtcgcgctggtcgatattcccgtccacggtgaaatcatccgctatggcgaagtgattggctatgcggtacgcgatattccgcagggcagctggattgacgaatcgctggtcgaactaccgaaagcgccgccgctgcataccctaccgctggcgaccaaagtcccggcgccgctgccgccgctggaaggctataccttcgaaggctatcgcaacgccgacggtagcgtgggcaccaaaaacctgctcggcattagcaccagcgtgcactgcgtggcgggcgtcgtcgattacgtggtgaaaattatcgaacgcgatctgctgccgaagtatcccaacgtcgatggcgttgtgggtctgaaccacctgtatggctgcggcgtggcgattaacgccccggcggcggtcgtcccgatccgcaccattcataatctggcgctcaatccaaacttcggcggcgaagtgatggtgattggccttggctgcgaaaaactgcagccggagcgcctgctggaaggcaccgacgatgtgaaaagtatccccgtggatagcgccagcatcgtcagcctgcaggatgagaagcacgttggttttaaatcaatggtggatgacattctgcaggtcgccgagcgccacctggagaagctgaaccagcgccagcgtgaaacctgcccggcctccgagctggttgtcggtatgcagtgcggcggcagcgatgcgttttctggcgtcaccgccaacccggcggtgggctacgcatccgatctgctggtgcgctgcggggcgaccgttatgttctcggaagtcaccgaagtgcgcgatgcgatccacttgctgacgccgcgcgccatcaacgaagaagtcggaaaacgcctgctggaggagatggcctggtacgataactatctcgatatgggcaaaaccgaccgcagcgccaacccctccccgggcaacaagaaaggcggcctggcgaacgtcgtcgagaaagcgctgggctctatcgctaaatccgggaagagcgcgattgccgaagtgctctctccggggcagcgcccgaccaaacgcgggctgatttacgccgcgacgccggcgagcgactttgtctgcggtactcagcaggtggcttccgggatcacggtgcaggtctttactaccggtcgcggtacgccgtacggcctggtcgccgtgccggtcataaaaatggcgacgcgtaccgagctggcaaaccgctggtatgacttaatggatatcaacgcgggaaccatcgccaccggagaagaaaccatcgaagaggttgggctgaagctgtttgaatttattcttgatgtcgccagcggccgcaagaagaccttctcggatcagtggggattgcacaatcagctggcggtgtttaacccggcgccggtgacgtgatcgaatcagcaatttatcccgctcgtgatgcttcgggcgggatacctctgctattgatgcgcgttaagaaaggcctctatctgcgccttcgtggacgttccctccatcgggccacggcgggaaatcgccagagaaccgctggcgttggcccatctcagtgcctcctgcggcgatgcgccggacaggaacaggctgacaaaggtcgcaccgaagcagtcgccagctcccgttgggtccacgaccgggacatgaaaaccggcaacatgatgcatttcccgggcgctgaaatagctcgctccgcgcgggccgcgtttaatcaccacgtgcttaacgccgcgctttaaaagcttatccaccagcacctgttcatcgcgccccgggttgaggccaaagtaatccagttcgccatcgctgggcaaaaagatatcagtgtaatcaaggatatactcaaaggcctgcgacatttcagggatattaagcatctctttacggatattcggatcgaacgaaaccgtgccgttgcgcgctttgatattttcaatcgctttacgcatcgcgtcgatcatgcgaaacgaaaacagcgaagagcccataatgtgaaaatggttgcactggctaagcagagtatcgtcaatatggtcagcggttagcaggccgcaggcgctgttcggcatattaaaaataaaatcgcgctgcgcctggctgcggtagctcacaaaagcgctgccggtggtcgccttctgcagtatggcgatgccattaatattcacgccgtcgctttccagccgcgcgatattcatttcaccaaacgcatcgttgccaacgcagctaaaaagcaccgaccctaaccccagctttgccacctgatcggcgaaaattgccggcgcgccgctgggatatggcccccaaaactctcccgggcgcgaaaagccctggttctcttcttttgccagaaactccaccagtagttcgccgatggtgcaaatggtcacattcatcatcgctcctttactttgccttttgcaaagcagggttgagccatgtcaggcactcgttattggtatagctgttagtcaggccagcggcgagaaggcgggcatgatactccgcggcgacaatctgcggcgtcacgatgccgctaatttgctgcaaatcgccaatcgggtagcgcttgtcgccatacaccggacgatgcgcgacgaccgcaatcgccctctcactttgcgccaccgcttcgctcagcaggcgggcgctggcttcctgtctgacgcttaaggtgccatcttcagcaatgtggtcgacagcgatcagcgctcgcgagggacgataatgacccagcgcgctcagcgccagatcgccttcgactattttgccgctactccccaacacaccgccgagcagcacggtttctccattcaggaactcctgcgccagcggcacatgcgccaggtcgtttaatagcaggcagagctcgtcataaccggcaaggaaagggatcactttgcgtaagattgatccctgccccaggaacagcgtttcgctatcttcgatctgcgcagcgatctggcgcgccatttcggtctccagcgctttgtccgtggcaaccggggcttcctgagccagggcgaccggagcgccggcctgggaagtgtaaattgcgccgccaaacgagcgcttaaggtagccctgctgttcaaggtagttcaggtcattacggatcgttaccccagatacagccagcatttcagccagatcgtcgactttgatctctccgttcttgcgcacgatctccgcgatgtccaggcgccttttcagcagacttgtagacggttttgccacagtgttgtgccttcttattttctcccagaataactttcatttttaaatttccccgctgcattgtcaaacgcaaggccttccatacctgtttcacgtcgatttaaaaacatttaattcagtaagttacataaaacatcgtcatttaagatacttttaaaaaagaaaacaaacaagactatataactttcatttttaaaattacatcactgttgtgtgcgattgatcacaacaatacgtcgagacgatcgctacattactttcaaaatgaagattcaaaacacaaaagtacttacaacatgaaagtaaaggagaacgaatgtacattatttcgagtaaaaacatgctgttgaaagctcagcgccacggctatgccgttcccgcctttaatatccacaacctggaaacgatgcaggtggtggtagaaaccgccgccgaactgcgttctccgctgatccttgccggcaccctgggaacttatagctatgcaggaaccgggaacgtggtggcgatcgctcgcgatctggctaaatactgggatcttcccttagcggtccacctcgatcaccatgaagatctgaccgatatcatgcataaagtgcaggccggtatccgctcggtcatgatcgacggttcacactcgccttttgaagaaaacgtcgcgttagtcaagagcgtggttgaactgagccatcgctatgatgccagcgttgaagccgaactcggccgtctgggcggcgtggaggatgatttggtggtcgatgcaaaagatgcgctgtataccaacccggaacaggcgcgcgaatttgtcacccgcaccggcatcgactcgctggcggtggctatcggtacggcgcacggcatgtacgccgcagaacccaaactcgattttgagcgcctcgccgccattcgcgatcgcgttgacgtccctctggttcttcatggcgcatccgggctggccgatagcgatatccgccgggcaatctctctgggcgtgtgcaaagtcaacgtcgctaccgagctgaaaatcgcgttctccgatgccctgaagcagtacttcgaggaaaatccggacgctaacgatccgcgtcattacatgaaaccggccaaagcggcgatgaaggatatcgtacgcaaagtcattcacgtttgtggctgtgaaggacaactgtaattttcggatcgaaggagcaatgtcgtgatccataccctgacactcaatacggcaatcgatatgaatatcttttgcgatccgctgaagccgtcggcagtgaaccgaacccggcacaccgaatattgcccgaatggcaaaggagtgaacgtttcgctgatattaaatcactatcagcaacccactcacattatgggtattttcggtggtttcactggccgttatatcgtggaagagttacgtcagaaaaaaattaaagtgacgccgacatgggtatctgagccaacccgaattaatatttttataaatgacggcgcagaggaatataagctcgttaaccccggtgcaaaaattgatgacgagtgtaaacagcaggttattcatcatctgcaatgcgtcacctccggggattatttagcgatcagcggcagcctgccgccgggaattgaaagccggttctatagcgagatcattgaattatgtcagcagaaaggctgcgagattatcctcgatatcagccatccggttctgcgccagctgctggaattacggccattgttgatcaaacccaacgatgacgagctgcgggaaatatttggtctcgacgtcagcaaccatcagcaggtacgcgaagctatgcgtaccctgcatcagttgggcgctcgcaacgtgctgctgacgatgggcgcggagggcctttacttttccgatggcgcaagcgtgtggttttgctccgcaccgaaaattgaactggtcagctccgcctgcgccggcgacgccgcgctgggcgcctttctcagtaaatggattaacgaagacgatgtcgctcacgccctggcactagccagcgcgaccggcgccgacgtcgccggttccgccggattaggaaatttacaacgcacagaagaattattacagcaaattcaggtcgttcaattataaaggtccgattatgaaaaaaattattgcagttaccggctgccctacgggtattgcgcatacttttatggctgaagaagccttaaaaaccgcagcgaagaaattaaatgtcgacattaaagtggaaaccaacggggcttccggcgttgaaaatgccattacccccgcggatttagaagatatttatggtgtaattattgccgccgataaagacgttaacgccgagcgatttaatggtctgccggtcattgaggttccggttaaagaagccattcatcatccggtcgatttaattaataaagtgatcggcggccaggcgtcgcgccgtcagggtatttcttcctcgccggagtcaccggagaaatacgcgcaagagtctttcggacgccaggtttataagcacctgatgagcggcgtgtccaacatgctgccgtttgtggttgccggggggattttaattgccatctccttcctgtggggtatctactcagccgatccgaactcgccgcagtataacgttattgccgcgacgctgatgaaagtaggccagcaggccttctcaatcatggtgccgatttttaccgcttatatcgcctggtctatttccggccgccccggtatggttgcgggcttcgtcggcggcttactggccaacgcgaccggcgcaggctttctcggcgggattatcgctggtttcgccgccggttattttatgttgctgatccgcaatatgctcaacggcctgccgcgtcagtatgaagggctgaaatcgatcttcattatgccgctcgttggcgtgctggtaataggcgtgatgatggtgctgctgggtcaacctgtcgccgccatcaacaacgcgatgatgaactggctgagttcattacaggaagcaaacccgattctgctgggcattgtggtaggcgcgatgtgctccttcgacttcggcggtccggtgaataaagccgcctacgtcaccggtacgctgctgcttggccaggggaactacttctttatggccggggtttccgccgcctgtattacgccgccgctggttatcgcgctggcgacaaccttcttcccgaaaggcttcagtgaagaagagcgcgccgccgggatggtcaactatatcctcggctgcacccatattactgaaggcgctattccattcgccgcgaaagatcctttacgcgtcatccccatgatgatgatcgcctcttccatctctgcgattctcagctatagcctgcaaatccaggttcctgctccgcacggcggcttcctgatcctgccgctggtaagtaaaccgctaatgtgggtgctgtgtattctcgccggttccgcctgcggcgcggtcatgctgggatgctggaggctatggcaaaaacggacccaggaagcagcgacgcttgccggtgccattaaataaggagctatttatgcaactgacttgcgcagatatccatttcgatcgcgcgatcaaaacgaaagatgaagcgctgcaacgcgtcgttggcagattaaccgaagccgggcataccacgcccgcttatctgaacggcatgcgcgaacgcgaaggacaaatcagcacgtatcttggcaacggtattgccattcctcacggcacgccgcagagccgcgatgcggtactgaaaaccggtgtcaaagtactggcttgcccgcagggggtggattggggagaagaacaagcggcttatctgattgtggggatcgccgcgcaggacaacgaacaccttgatattcttcgccagcttacccacgccctgagcgacgaacgcgtacctgcagcgctatcgcgcgctgagagtccgcaggcggtgctggagattctggccggcaatatcttcccggccgaaggggaagagatggaaccgcccccggcgttcgatgaagaggcgacttttaccctgcgcaatccccatggactgcacgcgcggccaagcgctgtactggtgaaagcggtgaagcagtggcgatcgcaaattcgggtggaaaatctcgacacccgttccgctattgttgacgccaaaaatctgatgcgggtggtttctctcggcgcaaaacagggacatcggctgcactttatggccagcggggaagatgcccatcaggcgctggaggctatcggtacggcctttaatgccggattaggcgaaattgccgctcaaccgcagcaggtcgttcagccagcagaaaagcctaaacggagctggatttcacgaatatttagttaaatttcaataaattaaaaacgctctgccgtcatcgccagagcgtttttttatctttaactttcgtaacattacgttttatctttctttttttcgagattgatcacaaatcaaaacaaaggagtttgcgggcaaaacaaaacataacgaatatattcgaaagaaaacggaggttttaaatgaaagatattatttcccgccacaaagctggcgaacacatcggcatctgctcagtttgttccgcgcatccgctggttatcgaagccgcgttacgtttcgatctgcataccaacaacaaggttcttatcgaagcaacctctaatcaggttaaccagtttggcggctacaccggaatgcagcctgcggacttccgtgatttcgtgaataaaattgcccacgaagtcggtttcccgtcagatcgcatcatccttggcggcgaccatctcgggccaaactgctggcagggcgaacccgccgccgaagcgatggaaaaatcggtcgatctgattaaagcctacgtcgccgcgggcttcagcaaaatccatctcgatgcctcaatgtcctgcgctgacgatccggtaccgctggacccggccgtcgtcgccgaacgtgccgctcgcctgtgccaggccgcggaagagacggcaaccgacgcgcagaaacgccatctgacctacgtcatcggcaccgaagttccggttcccggcggcgaagccagcaccatcggcagcgtccacgtaacccgcgcccaggatgcggcggcaacgctggaaacccatgaagccgctttccgcaagctgggtcttaacgcagcgctggaacgcgtcatcgctatcgtggtacagcccggcgttgagttcgaccatacgcaaattattcattaccagccagaggccgccaaagcgctctccgcgtggatcgaaggcacgccgatggtctacgaagcgcactcgactgattaccagtctcgtcaggcctaccgggcgctggtgcgcgaccattacgccatcctgaaagttggcccggcgctaaccttcgcgctgcgcgaagccatttttgccctcgcgcaaatggaaaatgagctgatcgctccggaatcccgcagccgcgtgatggaagtgattgatgaagtaatgcttaacgagccgggctactggaagaagtactaccgcccgacctggagccaggcaatggtggatatccacttcagcctgtccgatcgcattcgctactactggccgcatccgcgtattcgccagagcgtggaaaagttaattgcaaacctgaccgaaactaagctgccgctgggccttatcagccagtatatgcccgtgcagtttgaacgactgtcgttaaacgaactcgccgccgtgccgcacgacctcatcctcgacaaaattcaggatgtgctgcgtgcctaccgttacggctgttcatccgaaatcgcctgaagtaaagaggatttatgagtcaattgtttgttcgtaccggcattcattttagttccagccggcaggcgctggagcacattggcgaagagatgctggcgcgcggcgttgtgcacgacagctatccactggcgctgctcgaacgagaagcaactttccccacaggcattgcgctggagcagcacgcggtcgcgattccccactgcgaggcggtacatgcgaagtctccggctatctacctgattcgcccggacaacccggtcccttttcagcgagctgacgacgacggcgaaatcgacgtttcgttaatcatcgcgctgattgtagaaaatccgactgcacagctacagctgctgcgccggttatttagtgagctacagaacccgaacacgcttgaagcattgctggctgcctcacaggagcagctgcccgagctgtttcggcactctatccttgagtcagagcccagcgctcaggctttataacagactgataataaaaggggtaccctatgaaacgtaaagtaatcgtcgcctgtggcggcgctgtcgccacctcgaccatggccgcagaagagatcaaagatctgtgcgcggaccacagcatcgagctggacctggtgcagtgtcgggtgaatgaaatcgaaacctatatggacggcgcgcacctcatctgcaccaccgcccgggttgacagaacctttggcgacattccggtggttcacggtatgcctttcatttctggcgtaggcattgaagaactgcagcaaaaaatcctgaacatcctgacggagtaacgcccatgtttagcgaaatcatgcgttatatcctcgaccttggtccaacggtgatgctgccgatcgtgatcatcatcttctccaaaatactggggatgaagctcggggactgttttaaatcaggcctgcacatcgggattggtttcgtcggtatcggcctggttatcggcctgatgctcgactccatcggcccggcggcgaaagcgatggcggagcatttccagattaacctgcacgtgattgatattggctggccggggtcgtcgccgatgacctgggcctcgcaaatcgcgctggtggcgattcccatcgccatcgcggtcaacattttcatgctggtcacccgaatgactcgcgtcgtgaacgtcgacatctggaacatctggcatatgacctttaccggcgcaatgctgcatatcgcgaccggttcttactggattgggattcttggcgtagtggtgcatgcggctttcgtctacaagctcggcgactggtttgcgaaggatacccgcgactttttcggcctcgatggtattgctattccgcacggtagctcggcgtatttagggccgatagcggtgctggtcgatacgattatcgaaaaaattcccggcctgaaccgcatccacttcagcgctgacgacatccagaaacgcttcggtccgtttggcgaaccggtcaccgtcggttttgtaatgggtctggtcatcggcgcgctggcgggctacgacctgaagggcatcctccagctggcggtgaaaaccgcggccgtcatgctgctgatgccgcgcgtcatcaaacctatcatggatggcctgaacccgattgccaaacaggcgcgtaaacgtctgcaggcgaagtttggcggccaggatttcctgattggtctcgatccggcgctgctgcttggtcatacctcggtcgtatcggccagcctgatctttattccgctaactattctgatcgcggttgtggtgccgggcaaccaggtcctgccgttcggcgatctcgcgaccattggattctttgtcgccatggcggtggcggtacaccaggggaacctgttccgcacgctgatttccgggatcatcctgatggggataacgctatggattgccacgcagaccatcggcctgcatacccagctggcggctaacgccggggctctgaagacgggcggccttgtggcctctatggaccagggcggttcaccggttacctggctgctcattcagctcttcacctggcaaaacgtggtgggttttgtggttatcggcgtcatctatgttgccggcgtgctgttgacgtggcgtcgggcgcgcagcttcgccgccgcagagaaagccgccgtcgcgcaacaaagcccgggcgtttcttaatctcaagggggagcatccgctccccggacatttctggagaatattatgcaatcagtggttatccatgctgaggggacagtgcgcgttgaagaacgcccgataccgactctacaaacggaaaacgatgtcctggtcaaagtcgtcagctccggattgtgcggttccgatattccgcgcatcttcgccaaaggcgcccactactatcccatcaccctgggtcatgagttcagcggctatgttgaatcttacggctcagcggtgaccgacctgcagccgggcgacgcggtagcctgcgtgcctctgctcccctgctttaactgcccccagtgccagcgcgaatacttctctctctgcaaacagtaccagtttgtcggttcgcgcagcgaaggcggaaatgcgcagtacgtggtggtcaaacgcgccaacctgttccgtctgccggaccagatgccgattgatgacggcgcgtttattgaaccgatgaccgtcggcctgcacgccttccatctggctcagggctgcgaagggaaaaacgtcattattattggcgcaggcacaatcggtttgctggcgttgcagtgcgcccgcgaactgggcgccaaaagcattacggcaatcgatatcaacccgcagaagctggcgctggcaaaaacgctcggcgcaacgcacgtctttaacagcaaggagatgagcggcaaacagattcaaacggcgctggaagagattcagttcgaccagctggtgctggaaaccgccggtacgccgcaaaccgtggcgctgggcattgaggtcgccggaccgcgcgcgcagctggcgctggtgggtaccttgcaccatgacttaacgctgcctttcgccacctttggccagattcttcgaaaagagctgactattgtcggcagctggatgaactactcgggcccgtggcctggaaaagagtggcaaacggcggttcgcctgctgacggaaaaacgcattcagcttgccccgcttatcacccacatcggcgatgccgaaagctttgcccgcgaagtccaggcgctcaacggtgcgccgatgcaggggaaaatcctgcttaaactctcctgaccaactgagccagcaatcagagctggctcacataacctttcgaaaattatcgttcaactttcattacccttcgattacactaagatcagttaattatcaggcaaattaatatgaactcattcgagcgaaggaataaaattgtcgaaatggtcaatgcgcagggtagcgtattggtgctggacctttcgaatctctttggcatctccgaagtgacaatccgggccgatctccgtttactggaagaaaaagggttactcacccgctttcacggcggtgccgcaaggcccggcagcaatttgaccgaaggagataatctggaagtggtgcttgaagatcgttatcagttggccagcgatccgaaaaaacggatagcccaggccgcggcggcgatgattagcgaaggcatgacggtgatcctggatagcggcagcactaccctactgattgccgaggcgctggtacgtatgaccaatatcacggtgattaccaacagcctgcccgcggcgtttacgctatccgaaaacaaagatatcaccctggtggtctgcggcggcaccgtacgccacaaaacacactccatgcacggtaccatcgccgaacgttctcttcagggcatcagcgccgatctgatgttcgtcggcgcagacggcatcgataccaccaacggcatcaccaccttcaacgaaggttactccatcagcggcgtcatggccgccgcggcacataaggtcattgccgtgctggacgccagcaaattcaatcgccgcgggttcaatcaagttctaccgatggagaaaataaactgcgtgattaccgacagcgaaataaatgaagaacatcggaaggcattaaaaagtaccgggattgagttacacatcgtatagaaaataaggcagatgcggtgacatctgccctattgaccatcacgttttgtacgctgataacccgctaaagaatgcgccaggctccccttttttttgcgccggtccgctgtaatcttcccttttgctgcagcgtcttcagataccgctcaacggttctggcagaaacatctatttcctgagccatgtctttcgcggtgcgcgtgggttctttagacaaaagcttgaggatccgttcctcaacggccgccagcatttccactttttcttccgacatttcttccgacagagaagctgtttgtcctatgccatctttcaacgcgataaccatattttccagcataaattcaataaacggcgtgctgtcactctggctatcacacatccctaaaacctggtaatagcgctcctgctgataatgcatcaacgtttcaactggtagccaggcaagctccgcgcgccattggctaagaattaaggtttgccacaggcgtcccattcggccattaccatcggcaaatggatggataaactcaaattcgtagtggaagacagctccagcgataagcggatgaatgtcagtgactttcagccatagcagcaactcgtttatcaaacgctcgacctgagaggcggggggagccatatgaaccagtctggtatcccggaagatccctaaatcaccgtcacgcagctggccggggttatcaaccagccctatcatcagcgtccggtgggcggtcaaaagatcggttaaccggtggcttttccatgtaggcattttttcatatgccagaagagcgtttctcacttcctgaatatcttttgctggcgcaagaacacgtttaccctccactagcgcagtgacctgatcggtactcaggctgttatgctctatcgccaaagacgcctgaatcgtacgaatacgattctcttttcgcagaaggggggaggctcgtcccgtttgagctgaccagtgccctaacagctcaccaatctcaacaaccagattgagaatggcaggagtaatgctaaacggcggctggtaatgactcatgagattagtctccctgctgctccagggcatacttatacagggcgtttttcttcacgccgtggatttccgcagccagcgcggcggcttttttcagtggcagctcagcctgcagcagggccagcgtacgcagcgctaccgccggcagcgcctcttcctgcgctttaaaaccttctacgatcagcaccatctcgcctttacggcgattttcgtcctctttcacccatgccagcagctcgccgatcggcgctccgtgaatcgattcccaggttttggtcagctcacgtgccagcaccacgtagcgggactcccccagcacagcgcagatatcctccaggctttccagcaggcggtgggtagactcataaaaaataatcgtccgcggctcttcttccagcgccttcagcgtgtcacgacgccctttggatttggcaggcagaaagccttcatagcagaagcgatccgaaggcagacccgccgcgctcagcgccgcaatcgccgcacaggggccgggcagaggcaccacgcgaatattagcttcacggcaggtgcgcaccagatgatagccgggatcgttaatcagcggcgttccggcgtcggaaaccagcgcgatgttttgccccgctttaagcttcgccaccagcgtttccgccttttgctgctcgttgtggtcatgaagcgcgaataaacgggcgttgatcgcaaaatgctgcagcagcaaaccggtatggcgggtatcttccgctgcaactaaatcaacggcttgcaacacttccagcgcgcgttgcgtgatatcagacagattccctatcggagtgggcacaatatagagctgtccctgagaattatctgctgattcgtgttgtttcattgtctcgtccgtattgccgaattaatattgagcattgagccaaaaaaatatcactggacacatatggtaccgtcaacatttcttcgttctaaacccgtgcgttgtctgcccgtactgctggccgcgctgatctttgccggctgcggtacccatactccggatcaaagtacggcgtatttgcagggtacggctcaggcagactccagttactatctgcaacagatgcagcaaagcacgaatgatagcaagaccaactggcaattactcgccattcgtgcactgctgaaggaaggtaagaaaccgcaggcgatcgacctgttcaaccagctaccgtctaatctcaacggtgcgcaaagccgcgaaaggtcgctgctggcggtggaagtgaagctggcgcagaacgatttccagggcgcgcagacactgctcagcaagctcgacccggcaagccttgaggagaaccaactgccccgctactggcaggcgcaaattgacgccagccagggtcaaccctcgctgaacctgctgcgggccctgattgcccaacagtcgctgttaagcctgcctgcgcaaaagcagaaaaacatcgacgcgacctggaaagcgctcaccgccatgaccaaagatcaggccaacgcgctggtcattaacgccgatgagaacgtcctgcagggctggctggatctgcagcgcatgtggtttgataaccgcagcgatccgacgatgctcaaggcgggagtgaaagactggcagactcgctacccgcaaaacccgggggcgaaaatgctgccgacgcagctagtgaatatgcagaactaccaggccgcatcgaccaataaaatcgccctgctgctgccgttaaacggccaggcggcgatttttggccgcacgatccagcagggctttgaagcggcgaagaacggcgcgcctgccgttgcaggaagcgcagtacccgcccaggtcgcccaggcggcgaacgttgccgaaagcgccgtagtcagcccatcgcaggcggaggtcaccgatctgacgaccaccaataacgctcagaccccggtacaggcgccagcggccgaccaggcgcaaaccgcggcgccggtcaccgcgccggcggcagtacaagccccgacgccggaggccaccagccagccggcggaagcgccgcaggctcaggcagtcgccgcaacgccagccaacccttccgcagaactgaaaatctacgacaccaccactcagccaatgagccagctgctggcccaggtacagcaggatggcgcgaccatcgtcgtcggcccgctgctgaaagataatgtcgaagatgtcatcaagagcaatacctcgctgaacgtgctggcgctcaatcagccggaaaaagtcgaaagccgggccaatatctgctatttcgccctctcgccggaagacgaagcccgcgacgcggcgcatcacattcacgatcagggcaaacagactccgctgctgctggtgcctcgcggcgccctgggcgatcgggtggttaccgccttcgccaacgagtggctgaagctggggggcggtaccgtcctgcaacagcgcctgggctccaccgccgagctgcgcggcagcgtcaacagcggtatttcgctaagcggtacgccggtctcaaccctgccgtcagcgcaggacagcgccctgggtagcccgagcgatgtgccggtcagcagcaccggcggcgtcgacgccgcgtatatcctggccacgccggaacaaatcgcttacatcaaaccgatgatcgccctgcgtaacggcagccagagcggcgtaacgctctacgccagctcccgcagcgcccaggggacttccggaccggacttccgtctggagatggaaggtctgcaatatagcgagatcccgatgctggcgggaagtaaccctgccctgcagcagcaggcgctggccgccgttcgtaacgactactcgctggcgcgcctgtacgccatgggcgccgacgcctggtcccttgccaaccatttctcgcagatgcgccaggttcccggctttgagctgaacggcaataccggcgatcttacggccacgcaggattgcgtgatcaacaggaaactgtcatggctcaaataccagggtgggcaaatcgtcgcggccaactaagtaaacagaccggcgatgcctgggaaacccaggcgcgccgctggctggagagccagggtctgcgctttatcgccgccaacgtccgcgagcgcggcggcgagatagacctcatcatgcgcgacggcagcgtcaccgtctttgtcgaagtacgctatcgtcgcagcgcaaactacggcgatgccgcctccagcgtgacgccgcaaaagcaacaaagactgctcaaagccgcgcgcctgtggctctgccgacagaatgggagctttgagactgtggattgccgtttcgatgtggtagccttcaccggaaacgacatccaatggctaaaaaacgcctttggcgaatagcgtaaacgaattaagggatcccgtgctcgacagaatcaaagcctgcttcaccgaaagcattcaaacccaaattgcagcagcggaagcactcccggacgccatctcacgtgcggcgatgacgctcgttcagtcgctgctgaacggcaacaaaatcctctgttgtggtaatggcacttccgccgccaacgcacagcattttgctgccagtatgattaaccgttttgaaacagagcgtcctggtttacccgccattgcactaaataccgataatgtggtcttaaccgcaattgccaacgatcgcctgcatgacgaaatctatgctaagcaggtgcgagcgttgggacacgccggcgacgtgctgctggcgatttctacgcgcggcaacagccgggacatcgtgaaagccgtggaagcggcggtcacccgcgatatgactatcgtggcgttaaccggttatgacggcggtgaactggctggcctgttagggcagcaggacgtcgaaatccgcattccgtcgcatcgcagcgcgcgaattcaggaaatgcacatgctcaccgtcaactgtctgtgcgatttgatcgataacacgctttttccacaccaggacgattaaggagaacacatgaaggctctctcgcccctcgccattctgctgtctgcgctactgcttcagggatgcgttgctgccgcggtagtcggaacggcagcagtcggcactaaagccgcgacggacccgcgtacggtaggtactcaggtggacgacagcacgctggagctgcgcgttaacagcgcgctgtcgaaagatgaacaaattaagaaacaggcccgcatcaacgtgaccgcctaccagggcaaagttctgctgaccgggcagtccccaacgtccgatctctccgcgcgcgcgaagcaaatcgctatgggcgtagaaggtacgacggaggtgtttaacgaagtgcgtcagggccagccgatcggcttaggaaccgcgtcttcggatacctggatcaccaccaaagtccgctcccagctgctgggtaccgaccaggtgaaatcctccaacgtgaaggtgacaaccgaaaacggtgaagtgttcctgatgggtctggtaaccgaccgtgaaggacgcgcggcggcggatatcgccagccgggtgagcggcgtgtctcgcgtcaccaccgcctttacctatatcaagtaagcgtctctgcctcccggccagcgctacgctgagccgggctacgggttcaccgttggctgtgggccggtagcccggacaggcgcgcagcgccgcctccgggaagatcatcacagtaaagcgactcccccgaccaccgcgccgcacagcgccaccagcccaccggtcagccacagcgccttcgccgggaacgctttacgcagcataatcagtgacggtacgctgacagcaggcagcgtaatcagcagcgccagcgcgggcgccatgcccattcctgccagcatcatggtctgcacaatcgggatctccgccgccgtcggtatcacaaacaggcagccggcaatcgccatggcaatcacccagaacagcgtattctccaccacgccatcggcgtgagggaatagccacacccgcgcggcgcccagcaccagaaccgccagaatataaaccgggatggtattccagaacagcgtccacagcgcgcgcagccagcggctgaagaagccgtcctgccccgttgtgaccgacatttcaggcacgggaaccggctgcgtcgccgcttctttcacccatttctgaaccagcgtggcgaccaccagtacggtcgccagtcccgccagcaggcgaatcagcgcaaactgccagcccagcacgaagcccataaacaccagcgtcgccgggttgagcagcggattgcccagccagaatgccagcgcgccgcccatggatacctgctgtttacgcattcccgcagccaccggcgcggcgcagcaggtgcacatcatccccggcagagagaacgcggtccccagcagcgtaccgcgaaaacgcgattgccctaacgtgtgccgcagccagtcacgcgggatcagcacctgaatgagcgatcccagcagcacgcctaataccgccgctttccataccgccaggaaatagaccagcgcgtaatcccaggccgcagcgaaaggattcgcgtcgctatttgcaagaatggatttgccgatactgtgcgtctcagcggcggtaaaggctttgccgtaatagggctgccatttaacgaaccacagaccaacgataacgacgagaaaaaacagcgcgggcttccaccattgaaacggtgctgccgcctgagatgaagactgaccagccatagcattccccagggagtgtcatgataaattgaggacatgaatactacgcctccggggaaactttggaaatcagtaatcccccgcgcgcgcggccctttcgcgcagctgcgacgaggagagaatgcggacgccttcctgcgcgggcgagagcgcctccgcgagtagcgcgcttgccacgtcccgcgcgtctatcgatttcaggtttcccggcagcaggctaaaaagcggcgcaaggagcgtttcgccggtgcgttttttttcgcgctcgcctatcagcattgacgggcgggcaatggtcaggcgcggccactgctgcgcaatcagcgcctcttccatctcaccttttacgcgattatagaaaaagggcgaatgcgcattggcccccatcgcgctgacgaccagcatatgctgcgcgcccagcttttttcccaccagcgcggtatcaatgaccagcgtataatcggcatgcacaaacgcctctttgctacccgcttcccggcgggtagtccccagacagcagaaaacaatatcgaccggatcgaccacctgcgccagcgcgtccgtgagctgcggatcgtgcgggttaaatacgccggagatatcggtcagcggccgacgcgtgggcgcagcaatggacttaatatccggtacgttgagtagcattcgcagtaagtgaccaccaactaacccggttgcccccgttaacagtacctgactcatcgaaactcctttgcagatttttctatgttgcgatcccagcctcatgttccagacttaatactctacgaggtaattatccatcatcatcagggaaatgcctcattccacaccgaaacactggaggaagaatgagtaagaagatagccgttttaattaccgacgactttgaagactccgagttcacctcacccgcggacgcctaccgtctggccggacacaaggtggtgaccattgaaaaacaggcggggaagaaggtaaaagggaaaaaaggggaagctgaagtcgttatcgataaagccattgatgacgtcagccctgccgacttcgacgccctgctgctgccgggcggatattcaccggactcgctgcgcggcgacgaacgctttgtcaccttcacccgcgattttgtcaacagcggcaaaccggtcttcgccatctgccatggtccgcagctgttgattagcgccgatgtgattcgcgggcgcaagctgacggccgtgaagcctatcgtcgtcgacgtgaaaaacgccggtggcgaattctatgaccaggaagtggttatcgacaacgaacagctggtgaccagcagaaccccggacgacctgccggcctttaatcgtgaagccttacgcctgctcggcgcctgattcgcgcagccagtgcagctttttcccaaagcccagcgtgttatcggtgaacttgatctcatcgggacgaatctcccagacggatgccgatagcatgcgggcgacaggaaaacggctgacgtagcgcttgcgcatcgccgcctcttcttccccggtgaggcggcgaattttacctttgaactgtacgccgcggatcagcgccacgctctttggctggccgttgaccgtcccggccacgttggcgctttccccggtcatttggccgtggcgcgttttttcatcgctgagcagataaaatgcgaccttctccgggtcataaacgtaaaaagcattggcgcaccacagctcatcatcgcgggcgacgcaccaggtcacgacgtgctgcttacccagccagcggccgatcgcggcgagcgtatccatctttactctccagtatgttatggtgctcacaccttaacatagcgacctctgtaccgtgtgctggtttctctatctgattcgtaccgccgataatcgcctttataccgggattaccaccgatgttgcacgccgcttttgccagcaccagactggcaagggcgcgaaagcgctgcgtggaaaaggcgagcttcagctggccttcagtcaggaagttggtgaacgctcactagcgctacggcttgagtatcgtattaagcagctaacgaagcgccagaaagagcgcctcgttgccggggacggttcatttgaggcgctgctggaaagcctcagaagcgattaaagtggtcgctatattcgaccagcccgctcacgccgttcagcgcgtcatcggccagacgatgcacctggaaagcctcagcgctatcgggccagcggcagcgcagatcgaaacgcgccgcgggttcaaagcccagacggccatagagcgccggatcgccaagcgtcacgacggcggcatagccaaactcgttcagggaatcgagcccttcatagaccagctgacgcccgatgccctgaccgcggtagctttcatcgaccgccagcggagccagtccaacccactgcagctcttcgccttcgacggcgaccgggctaaaggccacgtagcctacgacctgaccttcgtcatccgtcgccaccacgcccagcgtgatcaggccatcttcacgaagactgtgcaccagctgcgcttccgcgtcgccgccgaaggtacgacgcaatagagcatcgatacccggcgcatcaatcccaatctctactcgaatcagcatgcctcacctaccgatgtctgttcaggtttctgcgggcctttcaggccagcttcaacaaagtccgccagctgcagcagcataatacgcagcgcctttggcatctgctccagctcaatggcatccatcaggttttttacatacagtcccagctcggtatcgccttcgataaccaggcgacgctggaagaacagcgtatccggatcctgcttacgcgccgcgatcatcagcaggtcgctggcgtcggcgctgaagctgacgtccgcttcagccgcagggctgaccaccagacgaccgtccaccaccgaggtataccacagcaggccgatgtcgcgcacatgaatacttaaccagcgcccctcgagaaactccagttccccatccgccagcgcctggcgaaattgccagcttaatacctgttccagcacctggcgcttgagggcaaatggcgccagcttaaccggcacgctcatcatcgacgggccaaagtgaaccagtttggaacgcagtttatccaacacaagctttactccatgaatgcaatagttcctctattgtgccatatcaaataaacgacatagcggcgtaaatcaacaaaatcacgatgccgggccgcaggtattgatcccgccaatacgcttttaactgcctcaaatcaaaaattgtcaccaaaaggttaactaaaatcccagctcattaaccatccagcgtccctgacgggccgcgtttttcaggaaaaattatggagctgctctgcccagccggtaaccttccggcgcttaaggcggccatcgaaaacggcgccgatgccgtctatatcgggctgaaagatgacaccaacgcccgccactttgccggccttaatttcaccgaaaagaaactgcaggaagccgtcagctttgtgcaccagcatcgtcgcaaactgcatattgccattaacaccttcgcgcatcctgatggttatgcccgctggcagcgcgcggtcgacatggcggcgcagctgggcgccgacgcgctgatcctcgccgatatcgcgatgctggaatacgccgccgagcgttatccgcatattgagcgccacgtttccgtccaggcctcggccaccaacgaagaggcggtaaagttttatcatcgcaattttgacgtcgcccgcgtggtgctgccgcgcgtgctgtcgattcaccaggtcaaacagctggcgcgcgccacgccggtgccgctggaggtttttgccttcggtagcctgtgcattatggcggaaggccgctgctacctttcctcttatctgaccggcgaatcgccgaataccgtcggcgcctgttcgccggcgcgcttcgtgcgctggcagcaaacgccgcaggggctggaatcacgccttaacgaagtgctgattgaccgctatcgggacggtgaaaacgccggctatcccaccctctgtaaagggcggtatctggtcgacggcgaacgctaccacgcgctggaagagcccaccagcctgaacaccctggagctgctgccggaactgatggcggccaatattgcctcggtgaaaatcgaggggcgccagcgcagcccggcgtacgttacccaggtggcgaaagtctggcgtcaggcgatcgatcgctgcaaagccgatccgcaaaacttcgtaccgcagtccgcgtggatggagaccctcggttccatgtccgaaggtacgcaaaccacccttggcgcctatcaccgtaaatggcagtgagaacagcaatgaaatattcattagggccggtgctttattactggtcaaaagagacgctggaagatttttaccagcaggcggcaagctgcagcgcggacacgatttacctcggcgaagcggtatgcagcaaacgtcgcgccaccaaagtcggcgactggatcgacatggcaaaaacgctggcgggaagcggtaaacaggtggtgctttccaccctcgcgctggtgcaggcgtcctcggagctgggcgaactgaagcgctatgtcgataacggcgaatttctgattgaagccagcgatctcggcgtcgttaatctgtgcgcggaacgtaagctgccgttcgtcgccgggcacgcgcttaactgctacaacgccgtcaccctgcgtctgctgctcaagcagggcatggtgcgctggtgtatgccggtcgaactttcccgcgactggctggcgaatttgctgacccagtgcgacgagctgggcattcgcggccggtttgaggtggaggtcctgagctacggtcatctgccgctggcctactccgcccgctgctttaccgcgcgctcggaagaccggccgaaagacgagtgtgaaacctgctgcataaaataccctaacgggcgcgacgtgctttcgcaggagaaccagcaggtgttcgtcctcaacggcattcagaccatgagcggctacgtctacaacctcgggaatgagctaagcgccatgaccgggctggtggatatggttcgcctgtcgccgctgggtagcgagaccttctctatgctggacgccttccgggcgaatgaaaacggcgcggcgccgctgccgctgacggcgaacagcgactgcaacggctactggcgacgactggccgggctggaattgcagagctgattaaccgctcactttgttaatggctatcgctgctttttaatgcactattaaagatgcagcttttctggctggcgtatcctggatacgccaggctggaagaagaccttcaatctgatgacgatgctgtagcaaagtgagcctttatgactgacaaatctgtttcgttctcggtgctcgatctggcgccgatcccgcaaggttcttccgcaaaggaagccttctcccactctttagacctggcgcagctggcggaaaagcgcggctatcaccgctactggctggccgaacaccataatatggtcggtatcgccagcgcggcgacttccgtcctgattggctaccttgccgcgaataccaccactctgcatctgggctccggcggcgtgatgctgccgaaccattcgccgctggtgattgccgagcagttcggtacgctcaatacgctctacccgggacgcatcgatctcggccttggccgcgcgccgggcagcgatcagccaaccatgcgcgcgctgcgtcgccatatgagcggtgaagtcgataacttcccgcgcgatgtcgcggagctggtggactggttcgacgcccgcgatcctaatccgcacgtgcgcccggttcccggctatggcgagaagatcccggtctggctgctcggctcaagcctgtacagcgcccagctggcggcgcagcttgggctgccgtttgccttcgcctcgcacttcgccccggatatgctctttcaggccctgcacctctaccgcacccacttccagccgtcagagcggttagcgaagccgtacgcgatggtatgcattaacattattgccgccgacagcgacagagatgcggaatttctgtttacgtccatgcagcaggcgttcgtcaaactgcgccgcggcgagaccggacagctgccgccgccggtgcaaaatatgcatcagctgtggtccgcttcagagcagtacggcgtcgaaaaagcgctgagcatgtcgctggtcggcgataaagcgaaaatccgtcacgggctggagtcgatcctgcgggaaacccaggccgatgaaatcatggtcaacggccaaatcttcgatcatcaggcgcgcctgcattcatttgatttggcgatgcaggtgaaagaagagcttctcggatagtgaaaaatgcggcatttctgccgcattttcaattagtgataggtgggtaatacgttaaagctcgacaggaaatgcacgataacgttacccagcccgaacagcagaaccaaagcaatcatcggctttccgccccaaacgcgaaacaatgggctaccaaagcgtttgcgcgatgcgcgagccagcagcgccggtacaattgccgcccagattgtcgccgccagccccgcatagccgatcgcgtagaggaatccgttcggccacagcaggccacccgccatcggcggaacaaaggtgagaagcgcggttttaaagcgtcccagcgcggagtcatcgaacccgaacagatccgccagataatcaaacagaccgagcgtcacgccaaggaatgaactggcaacggcaaagttcgaaaagatgactaacagcagatccagactccggctgttcagtaccccactgagcgcctggaccaggacatctatgttgccccccttctgcgcaataccgataaactcagggcgcgggatattgcccatcgtcaccagcagccacactacgtacagacccagcgccagcagcgtaccgtaaaccaggcacttaacgattgtgcgcggatctttgccgtagtacttcatcaggctcggcacgttgccgtgatagccgaaggacgcgaggcagaacggcagcgtcatcagcagatagggcatatacgaggcattttgttcagccacgttaaacagagtggtcggctggacgtgccccaacaggctgccaaaggtcaaaaagaaggtaatgaccttagctcccagcacaatggccgtcatgcggctcaccgctttggtgctcaaccagacgataaacgccaccagcagcgcaaaaccgaaacctgccgcccttgccggtacgttcagcgacatttcgctaaacgtatggtgcagaatcgagccgctggcggagatataggcgtaagtcagaatataaagaacaaaggcgatcgacacgccgttaaccagattccagcctttgccgagcagatctttagtaatggtatcgaagctcgagccaatccggtaattcaggttcgcttcgaggatcattaacccggagtgaagcatacaaaaccaggtaaaaaccagcgccgccagagaccagaagaaccacgcgccggacatcacaaccggcagtgagaacatgcccgccccaataatcgtcccgccaataatcactacgccgccaaacaaggacggtcgggttgccgtagtggtaagtgtcgccatttgccgaaatctccagtcgaaaatacttttcttgttatcaacgtgacgcactgtaccagtacacgagtacaaagggaataaaaaaagccccaatcataaagatcggggctgtatcgtttactttacgttagcggaaagcgctaattatgcatcgccaccgaaacgacgacgacctgcggagtcatcgcgacgcggagctgaagcatcatcgcggcgcggcgcgcggccaccttcacgacgttcgccgctgaaacgacgaccttcaccacggccgccttcgcgacgctcaccgccgaaaccacggccttcacgacgttcaccaccgccgaagctacgaccgccttcacgacgctcgccgccgccacgacgttcgccgctgcgttcaggacgcggctgagcatcgcccagcagctgcatgttcatcggcttgttcaggatgcgggtacgcgtaaagtgctgcagcacttcgcccggcatgcctttcggcagttcgatggtggagtgagaaccaaacagcttgatgttaccgatgtaacggctgctgatgtcgccttcgttagcaattgcgccaacgatgtgacgaacttcaacgccgtcatcacggcccacttcaatgcggtacagttccatatcgccaacgtcacgacgctcacgcttcggacgttcttcgccaccgcgatcgccgcgcgggccacgatcgttacggtcgccgcgacgttcgaaacgatcgtcacggtcgcggaactcgcgcttaggacgcataggcgcatccggcggcaggatcagcggacgttcgccctgagccattttcagcagcgcggcggccagcgtttccacgtccagctcttcgccttcggcagacggctggattttcgccagcagcgcacggtactgatccagatcgctgctttccagctgctgctgaactttcgccgcgaatttttccagacggcgtttgcccagcagttctgcgttcggcagttcaacttccggaatggtcagcttcatcgtacgttcaatattgcgcagcagacgacgctcgcggttctcaacgaacagcagcgcgcgaccagcacgacccgcacgaccggtacggccgatacggtgaacgtaagactcggaatccatcgggatatcgtagttaaccaccaggctgatacgctcaacgtccaggccacgggccgcaacgtcggttgcaatcaggatatccagacgaccatctttcagacgctccagagtctgctcacgcagggactggttcatgtcgccgttcagcgcagcgctgctataaccgctacgctccagcgcttcggccacttccagggtcgcgtttttggtacgaacgaagataatcgccgcatcaaaatcttccgcttccaggaaacgcaccagcgcttcgtttttacgcataccgtaagcagtccagtagctctggctgatgtccgggcgagttgttacgctcgactggatgcgcacttcctgcggctctttcataaagcggcgggtaatacggcgaatggcttccggcatggtggcagagaacagagcggtctgatgaccctccgggatctgcgccataatggtttctacgtcttcgatgaagcccatgcgcagcatttcgtcagcttcatccagaaccagaccgctcagcttagagagatccagcgtaccgcgtttcaggtggtccagcagacgacccggggtaccgacaacgatttgcggcccctgacgcagcgcgcgcagctgcacgtcataacgctggccgccgtacagggcaaccacgtttacgccgcgcatatgtttagagaattccgtcattgcttcagcaacctgtaccgccagttcgcgggtcggcgccagcaccagaatctgcggtgctctcagctcaggatcgatgttgttcagcagcggtaaagagaacgctgcggttttaccgctacccgtctgggccatacccagaacgtcgcggccgcccagcagatgcggaatgcactcagcctggatcggagatggtttttcgtaacccagatcgttaagcgcttcaaggatgggagccttcaggcccagatctgcaaaagtggtttcgaattcagccatgtagtacgtgtgcctcaaaattaatggcggccagtctacataactcatcgtgaaaatttacggtaattttcattgaaaagtgtgaaccggctcaaagtaggtgtattaacgaacaacaacgccctcacccgcaaaggtgatggcaatcaaaaaagggctgatgtgttcgtcagctattgctggtccgattctgccaggtcatcttgctcctggcccaagagcgataattccaacaatgcgtatcggtgctcaacgtagttatgaacgttgtttgcgaccgccagtttgaacagtgccgtagcgctgtccttgtcccccagacttaggtagtacttacctaaatagaagttggtttcactgagatgctcagcgagcgaggtgttatccgttgcgtctgccttcagacggtccattagctctttttcgctaatgtcgccaaggtagaacccgacaatgttccatccccattgttctttatccgacttgtttaagcgctgtctcagtgcttcaagcgcctgcttctcatcgagctgacgctcggcgagataaagccacaggcttcggaaaggatcattgggatcgtcttgataaaacgccagcagatcatcttgcgctaacttagcgcgaccgccgtaatacagggcgataccgcgatttaagtgcgcgtagttgtaagttggatcaagctcaagtacagaatcaaacgcttcataggcagcatcaaaattgcctgcctgcgttaagtaaatgcctaagtaattgaatacttcaggcatatccggtcggattgccagcgcttgtgaaaaatcatttcgcgctaatgccctcagaccgagactatcatacaacactccgcgctcatataaaagctgtgcgcgttcgtcatcggttaaagcccgactggcaagaatttgttccatgcgcgccagaatcacttcctgctgcaaagtcggttgcaatggcaccgcgaggactgcgtccttacgccaggcagagttgctgcatcctgccagcgtgagagctgtcgccacgaaacaccagcgcaaaaaaggcttcatttcccactcccgaagacaacgattggatgaacgtccagttccccggctgcaaacagggcgtcctgcccgcaatgcgccctccgcaatgcggagggcaaacggcaaccttactcgccctgctgttcggcagccggagcttccggcgcagccgcaggctgagtttgttcagttgcttctttgatgctcagacggacacggccctgacggtcaacttccagaaccttaaccggcacttcctgacccatctgcagatagtcggtcactttctcaacgcgcttgtcggcgatttgagagatgtgaaccagaccttctttaccgccgccaatggcaacaaacgcgccaaagtcaacgatacgggtcactttaccgttatagatacggccaacttcgatctcagcggtgatctcttcgatacgacgaatcgcgtgctgcgctttgtcgccgtcggttgccgcgatcttcacggtaccgtcatcttcgatttcgatagtggtgccggtttcttcggtcagcgcacgaataacggaaccgcccttaccgataacgtctttgattttgtccggactgatcttgatcgtgtggatacgcggtgcgaattcagagatatcgccgcgcggcgcgttaatcgcctgttccatcacgcccaggatgtgcagacgcgcacctttagcctggttcagagcaacctgcatgatctctttggtgataccttcaattttgatatccatctgcagagcagagataccttcgcgggaacccgctactttgaagtccatatcgcccaggtgatcttcatcgcccagaatgtcagacagtacgacgaagttgtcgccttctttcaccagacccattgcgatacccgcaacggcggctttcaccggcacgcctgcgtccatcagcgccagagaagcgccacagacggaagccatggaggaggagccgttagattcggtgatttcagaaaccacgcgaacggtgtacgggaactcttcgatagtcggcatcacggccagtacgccgcgcttagccagacgaccgtgaccaatttcacgacgcttcggagaaccgaccattcccgtttcgcctacggagtacggagggaagttatagtggaacaggaaggagtccgtgcgctcgcccatcagttcatcgatgttctgcgcgtcgcgtgcggtacccagggtcgcggtaaccagcgcctgagtttcgccacgggtaaacagtgcggaaccgtgggtacgcggcagaacgccggtacgaacgtccagaccacgaatcatatctttttcacgaccatcgatacgcggctcaccggccagtacgcggctacgcaccacgtttttctcgattgcgtgcaggatttcgcccagttcgttagcgtccagagcttcatcttccgcaaccagggtcgcgatagtttcagatttgatcacgtcaacctgagcatagcgctcctgtttgtcggtgatacggtaagcatcgctcaggcgagattcagccagcgcggcaacgcgcgcgttcagcgccgcatcaaccacttccggctgccagtcccagcgcggcttaccggcttctttcaccagatcgttgatgttctgaataaccacctgctgctggtcgtgaccaaacacgaccgcgcccagcatctggtcttcgctcagcagttcagcttcggattcaaccatcagtactgcggcttcggtacccgcgacaaccagatccagtttgctggacttcagctcttcctgggtcgggttcagcacgtactggtcattaatataaccaacgcgagcggcgccaattgggccgttgaacggaataccagacagggacagcgctgcggaagcgccgatcatcgcgacgatatccgggttaacctgcgggttaacggaaaccacagttgcgataacctgaacttcgttaacgaagccttccgggaacagcgggcgaaccgggcggtcaatcagacgcgcgatcagggtttcgccttcgctcggacggccttcacgacggaagaaaccacccgggattttacctgcagcgtaggtacgctcttgatagttaacggtcagcgggaagaaatcctggcctggcttcgcttttttctggcccacaacggtaacgaataccgcggtgtcatccatgctaaccataacggcggcagttgcctggcgcgccatcatgccggtctccagcgttacggtatgttggccgtactggaatttacgaacgatcggattaagcaaaattctatccttttatctatagatgatgtcaaatccacgataagacatcgtatgacccgatcttctgcatcctcgcgactaatgacaacctttacccgcccctgcgagtcaagcctctcattagccgcgcgaacctctgcatgaagatcattaatagcaacaatacatgagtttttaatgaattgctgccgcccggtcgaaaaaaggggccgtgaggccccttcttctgaaactcgcagaattagcgacgcagacccagacgctcgatcagagcagagtaacgtgcaacatctttacgtttcaggtagtcgagcagtttacgacgctgagaaaccatgcgcagcagaccacgacggctgtggtgatcttttttgtgctctgcaaagtgaccctgcaggtggttgatctgtgcagtcagcagtgcaacctgaacttcagtagaaccgctgtcgttttcgccacgaccgaactcagaaacgatttttgctttagcttcaacgcttagagacattttcgaactccaaaattaaaagaaagaaagggtgccgatctctaattcagcaacccctgatataacgctcgcaaatgttaaaacacgttggcgaacgttaagcggcgatattctactcgcagcagccttttatcgcaaggaaagcgctcagacagggtattcaaccaccagacgacgaggcgccacgcggccttcatcatccatctcacccataccaagaaacttctcttcagcgccttcagtaacgcgaaccagcccctgcagcggcgcgcccgatatccgcaccgggttaccgtttttaaagtagacggctgaagtttccggaatattcaccagcgggtaatccgaagccggactgtccatcggcatcagcagcgggtccagcagctgggctgcgggaatatcctgcgcatgtgcttgttcgaccagcgcctgcagctgctccagcgtcaccatccgttcgacgggatatttactgaccgccaggcgacgcaggaaaatgacgtgcgcgccgcacccgagtttctcgcctaagtcatcaataatcgtgcggatataggtgcctttcgagcagtgaatctccagctcaagctccgtcccctcatggcgaataaacagcagctcgtacaccgtaatcggccgggattcacgcggtacttcaatcccctgtcgggcatattcgtacagctttttcccctggtatttcagcgccgaatacatcgacggtacctgctgggtttcgccacggaagccgtcgagcgctgccgccagctgctccgggctaaacgtcagcggacgctcctccaccacctggccatcggcatcagaggtatcggtgcgctggccaagcctggcaatgacgcggtagcgcttgtcagaatcgagcagatactgggaaaactttgtcgcttccccgaggcaaatcggcagcataccggtcgccagcggatccagcgccccggtgtgccctgcccgattagcattataaagccgcttaactttctgcagcacgtcgttgctggatgcgccctgcggtttatccagcaacagtacgccatgcacgtcacggccgcgacgacgaggacgactcattagtcctccttactgtcgtccgggttcacacgacgttcatcgtcatgttttaccacgctggtcaccaggttcgacatgcgcatcccttcgactaatgaattgtcgtagaagaaggtcagttccggcacgatacgcaggcgcatcgctttgcccagcagcgagcggataaaaccagatgcttcctgtaaagccttgatccccgctttcacggcggcttcgtctttgtcgttcaggaaggtcacaaacactttggcataggccaggtcgcgggacatttcaacgcctgaaacggtcgtcatcatgcccagacgcgggtccttaatttcgcgctgcaggatgattgcgatctctttttgcatctcctgggccacgcgctgcgggcgaccaaattctttcgccataataaattctccagacaaataagggggccacgcggccccctttaattttgtataaccgggtggcgctgcgcttccccggcctactaaacgattaatcgatggtacgttgaatctcgatgatttcgaacacttcgatcatatcgccaacgcgaacgtcgttgtagttcttaacgccgataccacactccataccgttacgaacttcgttaacgtcatctttgaagcggcgcagggattccagctcgccttcatagataaccacgttgtcgcgcaggacgcggattgggttatgacgcttgatcgtaccttcggtaaccatacagcctgcgatggcgccgaatttcggcgatttgaacacatcacggacttcagccagaccaatgatctgctgtttcagttccggagacagcatgccgctcatcgctgctttcacttcgtcgatcagatggtagatgacggagtagtagcgtagatccaggctttccgcgtcgataactttacgtgcggatgcatcagcacgtacgttgaagccaaccagaatcgcgttggatgcggccgccagggtcgcgtcggtttcggtgataccacctacgccggaaccgataatcttcactttcacttcgtcggtagacagttttagcaaggagtcggagatcgcttccactgagccctgcacgtccgctttgaggacgatgttcacttcgtgaacttcgccttcggtcatgttagcgaacatgttctcaagcttagatttctgctgacgagccagtttaacttcacggaatttaccctgacgatacagcgcaacttcacgtgcttttttctcgtcacgaacgacggtcacttcgtcaccggcagccggtacgcctgacaggccaaggatttccaccggaatggacggacccgcttccagcacttcctgacccagttcgttacgcatcgcacgaacgcgaccgtattcgaaaccgcacagaacgatgtcgcctttatgcagcgtaccttcgcgtaccagaacggtggcaaccggaccacgacctttatcgaggaaggattcgataaccgcgccgctcgccatacctttacgaaccgctttcagctccagaacttcagcctgcagcaggattgcgtccagcagttcgtcgatgccggtacccgctttagcggacacgtggacgaactggctttcaccgccccactcttccggcagaatgccgtactgggaaagctcgtttttaacgcgatccggatccgcttccggcttatcgattttgttcaccgcaaccacgaccggcacacccgccgctttcgcgtgctggatagcttcgatggtctgcggcattacgccgtcgtctgccgccacaaccagaaccacgatatccgtcgcctgcgcaccacgagcacgcatagaggtaaacgcggcgtggcccggggtatccaggaaggtgatcatgccgttgtcggtttcgacgtggtacgcaccaatgtgctgggtaatgccgcccgcttcgccagaagccactttcgttgaacgaatgtagtccagcagagaggttttaccgtggtcaacgtgacccatgatggtcacaaccggtgcgcgcggttcagccgcagcgccggtgtcacggtcgctcattaccgcttcttccagctcgttttcacgacgcaggataactttgtggcccatctcttcggcaaccagctgtgcggtttcctggtcgatgacctggttaatcgtcgccatggcgcccagcttcatcatcgctttgatgacctgagaacctttgacggccatcttgttggccagatcgccaacggtgatggtttcgccgatgataacatcacggttaaccgcctgagccggcttctggaagccttgctgcagagcagaacctttacgatgcttgccacctttaccgccgcgaacggccgcacgggcttcttcacgatcggctttcgattcagcgtgtttgttgcctttcttagccggacgcgccgctttcgcattacgtccacggccgcgaccgccttcaacttcacgatcgttatcgtcttcagcctgacgtgcatgctgagaagtcgttacgtgatagtcagtggtctcttcaggggtttctggcgcttcagtccagttcttttcattttcttgagccatacggcgtgcttcttccgctacacggcgcgcttcttcttcaagtttgcggcgtgcttcttcttccgatttgcgcttcagctccgcagcttcgttttcgcggcgttgcttttcagcctgggcggttttggtcatatcgtcggtttgttgattgctcactttgtctttttccgcggcttcacgtttcgctttatcggcgagttcacgtttcgcttgttctgcggcctcacgttcagcttttaattgcgcctcgcgtttggcagcttcttctgcctcacgacgggcttgctcttccgcttcacgctgcgcctgctcttccgcggcaaggcgttcggcctcttgcggatcgcgtttcacaaaggtgcgtttcttgcggacttcgatttgtaccgacttactctttccaccggtacccggaatatttaacgtgctgcgcgttttgcgctgcagcgtcagcttgtcgggcgctgagccgtgttcacggttcaggtgcgtcaacaaggtttgcttctcttgcgcggtcacagaatcatcagccgatttgcggatccctgcatcagcaaattgctgtatcaggcgatccacagaggtctgaatctctgaggccagcgctttaatggtcacatctgtcatgctgttccttcctgctacagtttattacgcttcgtcgccgaaccaacaaatattacgagcggccatgataagttctccggctttctcgtcggtcaagccttcgatatcagccagatcatcaatgccctgctcggcgagatcttccagcgtacaaacaccacgggcggccagggtgaatgccagagcgcgatccaaaccttccagattcaacagatcgtcggcaggtttgctgtcacccaggctctcttctttggccagcgccagcgtggtcagcgcgtttttcgcccgctcacgaagtgcttcaacggtcgcttcatccagaccgtcaatttccagcagttctttcattggcacataggccagctcttccagagtggcgaaaccttcttcaaccagcagcgtggcgaaatcttcatcgatatcaagatatttagtgaaggtatcaatcgctgcatgggcttcagcctgatgcttagcctggaggtcatcaacggtcatgacgttgagttcccagccgctcagctgagacgccagacggacgttctgaccgttacggccaatggcctgcgccaggttgcccgcttctactgcgatatccatggtgtgcttgtcttcatctaccacgatagatgcgacgtcagccggagccatggcgttaatcacgaactgcgccgggttatcgtcccacagcacgatatcaatacgctcgccgcccagttcagtcgagactgcctgaacgcgcgcgccgcgcataccgacgcaggcgccaaccggatcgatgcgcttgtcgttggttttaaccgcgattttggcacgagagccaggatcgcgagccgccgctttaatttcgagaacttcttcaccgatttccggcacttcaatgcggaacagttcaaccagcatttccggcttggagcgagtcacgaacagctgcgcgccgcgcgcttccggacgaactgcgtacagtacgccacggatacggtcacccggacggaagttctcacgcggcagcatatcttcgcgcaggatcacggcttcagcgttgttgcccagatccagcgtaatattgtcgcggttcactttcttcactacgcccgtgatgatttcaccttcgtgctcacggaactgatcgacgaccattgcgcgttcggcttcacgtactttttgtacgataacctgcttcgcggtctgcgtagtgatacggtcaaaggtgacagattcaatctggtcttcgacgtaatcgccaggattcatgctttcatcttcgaaacgcgcagcttccagcgtgatttcgcgagtcggctgggtcacttcttcaacaaccagccagcgacggaatgtgtcgaaatcaccgcttttacgatcgatttctacgcgaacgtcgatctcttgctcatattttttcttggtagccgttgctagcgcactttccaacgcttcgaaaattttctcacgcggcagcgccttttcgttggaaacggcttcaacaacagccaaaatttctttgttcatcggggcctttcacctcaatccagactgttaaaagtggggaaccaggttcgccttctggatgttactcagcgcgaacacttcatctttgccttcgacggttaccgtgatcatctcaccgtctaccgctttgataaggccctgccatttgcgtcggttctgtaccgccatgcgcaaaaccagcgaaacttcttcgccgatgaaacgctcatagtgctcggcggtaaacataggacgatcgagacctggagaagaaacttccaggttataagcgactgtaatcgggtcttctacgtccataacagcactgacctggtggctcacatcagcacaatcatcaacattgatgccatcttcactatcaatatagatgcgcagtgtggacgtgcgaccgcgaataaattcgatgccgaccagctcaaagccaagcgcttcaactggcgctgtgagcatctctgttaatttttgctctaatgtggacaaacccacccccaagacataaaaaaagggcgtatagcccagttattctgaagtcagataacaaaaaaccccgataaatcggggctttagataactgaaccctgagatcgcaactgcgatctggaacactttccagaagaattctttcaaattcgtctacgaaggacccggtcctcacagtatatttgaaaaagtacttaatgggaaagtggttgcgggggccggatttgaaccgacgaccttcgggttatgagcccgacgagctaccaggctgctccaccccgcgcctgaaacgtggcatattttactcgttttgagtaaaagacgcaaatactgctgggatttggtaccgagagacgggacataaaatcgtagtgaattgtattgatacttcatatattttgtcaacatgaatttcacattgccaggtttcggttcatgctggtatttctgggttttttggcaaaaagcggctcagcctcttcctgtcgccagcaaaagatgattaaatgaaaactcacaattaatgcataaacatgcaataaagattgttgagtcaaactcaccacagtctatctagcagggttttattttatgacgacgattctcaagcatctcccggttggccaacgtattggtattgctttttctggtgggctggataccagcgccgcgctgctgtggatgcgtaaaaagggagcagtcccttatgcatataccgccaatctgggacagccagacgaagacgattacgagaccattcctcgtcgtgccaaagagtatggtgctgaaggggctcgtctgatcgactgccgtaagcagctggttgcggaaggcattgccgcgatccagtgcggcgcatttcataacaccaccggcgggttgacctactttaataccacgccgctgggccgcgcagtgaccggtaccatgctggtcgccgcaatgaaggaagacggtgttaacatctggggcgacgggagtacctataaaggcaacgatatcgaacgtttctatcgttacggcctgctgaccaacgctgagctgaaaatttacaaaccgtggctggatagcgactttatcgacgagttaggcggccgccaggagatgtcagagtttatgatctcctgcgggtttgactataaaatgtcagttgaaaaagcctactcaaccgactccaatatgctgggcgcgacgcacgaagctaaagatcttgaattcctgaactccagcgtcaagattgtgaacccgattatgggcgtcaagttctgggatgaaagcgtcaaaatccctgcggaagaagtcaccgttcgctttgaacagggccatccggttgcgctgaacggacagacctttagcgatgacgttgaactgatgctggaggctaaccgcatcggcggacgccatggtctgggtatgagcgatcagatcgaaaatcgtatcatcgaagcgaagagccgcggcatctatgaagccccgggaatggcgctgctgcatattgcctatgagcgtctgctgaccggtattcataacgaagataccattgagcaataccacgcgcacggtcgtcagctgggtcggctgctgtatcaagggcgttggttcgattcccaggcgctgatgctgcgcgacggcctgcagcgctgggtagcaagccaaattaccggcgaagtgacgcttgaactgcgtcgcggcaacgactactccatcctgaataccgtctctgataatctgacctataaagcagagcgtctgacgatggaaaaaggtgactcgatgttctccgctgaggatcgtatcggccagctgacgatgcgcaacctggatatcaccgatactcgcgataagctgtttggctacgcgcagtccggactgctgaccgcgtcttccgccactggcctgccgcaggtggaaaacctggaaaataaagcgaagtaacgctgcagagaaattcgcaaaggccgctaacgcggccttttttatgcagaaaaatcccgaacccaaccggacatatctgccgctaatgctgctgctcaactttttggggacgaaaaaaaagacgcttttcagcgtctttcttcaggaaattggtaccgaggatgggactcgaacccacaagcccgttagggcactaccacctcaaggtagcgtgtctaccaattccaccacctcggtacggatactgcttatcagtgcgggatgtcgctgctcggctgcgccggcgcggtcggctgagtttgctcagttttcggcgcgctcagattatcccactcacttcctttattggtcttgttgctgttgatattgcccagcgccagactgatgatgaagaacagcgcagccaggataccagtcatacgggtcatgaagttaccagaaccgctggatccaaacagagtgccggaagcgcctgctccgaaggaggctcccatatcagcgcctttaccttgctgcagcataatcagacccacaaggccaattgccacaataaggaaaacaactaaaagagcttcgtacataatcaacctgttccttgcggatttgccgcataccaagtgcttcgaccaataaagcgggacgttttaacgtttcccactgaagcgggtgtgaatactaaccaaagcgaatgaccttcgcaagggcaatttcagcgcattgtatcaagtgcggaaaaaaacagcaaaaagcgattttttgtcgattaaaaaggcggcaagcgtcgcctttttaatcacttagcaagagaaattaaacgctttttacggcatcggcgatacggtgggcaaattcgtgcacctgctcttcgtgctcaccttccaccataacgcgaatcagcggctctgtgcctgatttacgcagcagtacgcgcccccgattgcccagcgccgcttccacttcagccgttaccgcttttacgtgctcatgttccagcgggttaccgctaccttcagtaaagcgaacgttaaccagaagctgcgggaacattttcattccgctgcacaggtcgtgcaggctcatatggttacgcaccatcgccgccaccacctgcaggctggcgacaatcccatcccccgtcgtggttttatccagtaagatcacatgaccggagttttctgcgccaatgcgccagcctttctcctgcagcttctccagcacatagcggtcgcccaccttcgcgcgaacgaaaggaatgcccagctgtttgagcgccagttcaaggcccatattgctcatgagcgtcccgacggcgccgccccgcagctgcccctggcgtagcccctcacgggcaatgatatagaggatctggtcaccgtcgactttgttgccttcgtggtccaccatgatgacccgatcgccatcgccatcgtaggcaatacccaggtcggctttctccgccagcacgcgcgcctgcagagcacgaacgtccgtcgccccgacctcttcattgatgttgaggccatcaggctcacagcccatcgctataacctgagcgcccagctcgcggaaaacattcggcgcaatatgataagtcgccccgtgagcgcaatcgactaccaccttcaaagcattgaggctcagctcgttcggaaaggtgcctttgcaaaactcgatatagcgaccggcggcgtcgacgatacgactggctttacccagctcggcggaatccacgcaggtcagctctttttccatttcggcttcaatggcttcttctacctcatccggaagcttggtaccttcgatagagaagaatttgatgccgttgtcataaaacggattatgtgaagcggaaatcacaatcccggcttccgcgcggaaggtgcgcgtcagataggcaattgccggcgttggcatcgggccggtaaaagaagcggataatcccgcggcggccagtccagcctccagcgcggactccagcatataccctgaaatacgggtatctttaccaataataatcttccgtgaaccgtggcgtgcaagcaccttacccgccgcccagcccagctttaatacaaattctggcgttattggcgcatcgcctacgcggccacgaataccatccgtaccaaaatatttgcggttactcataacgtttattttccttagcggccagggtagcttccaccacgcgcagcgcttctaccgtttctttgacatcatggacgcgaataatctgcgcgccctgcattgcagcaatgactgcgcaagccaggctgccattcaggcgttccgtcggcccgacattcagcaactgacctaccatcgacttacgtgacatgcctaccagcagcggaagaccaaaatgatggaactctccaagtcgggcaagcagttcataattatgagaaagatttttaccgaaaccaaatcccgggtcgagcaacaatttatcttttgcgataccggcccgttcgcagcgcacaatatgttcgataaaaaagcgctcaacgtcagcaaacacgtccgcgtacttcggggcatcctgcattgtcttcggctgaccctgcatatgcatcaggcacaccggcaagcccgtttcagccgccgcctccagcgctcccggttcggtcagcgagcggatatcattgatgatatgcgcgccaacacgcgctgactcgcggatcacctccggctttgaggtatcaacggaaatccagacttcaaagcgctgggcaatcgcttctaccgtcggaatgactcgcgccagctcttcctcgacgctgacatctgccgcccccggacgcgtcgattccccaccgatatcaatgatagtcgccccggcattgatcatcagattggcatgcttcacggcttcgaccagcgtgttgtgggtcccgccatcagagaacgaatccggggtaacgttaagaatacccatcacatgtgggtgagagagatcgagggttgagccctgggctacaagtttcatcgctaaatccctgagtcagagaaagattgaaaaagaaaaaccccggagcaaacgctcaggggttttagaaaagtacaacagcatcaataacggctaacttatttgtcgcccagctgttctgacatcgtattacccgggtttggcgtacgcggttcatcgaccggacgcggcgcacgaggcgtgccattgttgtcagaattgttggacgagcccggttcttcccagccagctggcgggcgaacatcgcggcgagccatcaggtcatcaatctgcggggcgtcgatggtctcatatttcatgagcgcatctttcatcgcgtgcaggatgtccatattatcgttcagaagctggcgtgcacgattgtagttacgctcaatcagtgacttcacttcctggtcgatgatacgcgccgtttcatcggacatatgcttcgctttcgcaacgctgcggccaaggaatacttcaccttcttcttcggcatacagcagcgggccgagtttgtcagagaagccccactgggtcaccatgttacgcgccaggttggtcgcgactttaatgtcgttcgacgcaccggtagaaacatgctctacgccgtagataatctcttccgccagacgaccgccgtaaagagtagaaatctggctttccagcttctgacggctggcgctaatcgcgtcgccttcaggcaggaagaaggtgacacccagcgcgcgaccgcgcggaataatcgtcactttgtgcaccggatcgtgttccggcaccaggcgaccaataattgcgtgaccggcttcgtgatacgcggtggactctttctgcgcttccgtcatcaccatggagcgacgttccgcacccatcatgattttgtctttcgctttctcgaattcaaccatcgatacaacgcgcttgttgccacgagcggcaaacagcgcagcttcgttcaccaggtttgccaggtcagcaccggagaagccaggcgtaccgcgggcgataattgccgcgtcgatatccggcgccagcggtacgcgacgcatatgcactttcagaatctgttcgcgaccgcggacatccggcagaccgaccacaacctgacggtcaaagcggcctggacgcagcagcgcagggtcaagaacgtccggacggttggttgccgcgataacgatgataccttcgttaccctcgaagccgtccatctcaaccagcatctggttcagcgtctgctcacgttcatcgtgaccaccgcccaggccagcgccacgctgacggcccacggcgtcgatttcatcgataaagatgatgcacggagccgctttcttggcttgttcaaacatgtcgcgcacgcgggatgcacccacaccgacgaacatttcaacgaagtcagaaccggaaatcgtaaagaacggcacctttgcttcacccgcgatggcttttgccagcaaggttttaccggtgcccggagggccgaccatcaggacgcctttcgggattttaccgcccagcttctggaaacggctcggctcgcgcaggtattcaaccagttcaccaacttcttctttcgcttcgtcacaaccggcgacgtcggcgaaagtggttttgatctggtcttccgtcagcatacgcgccttgctcttaccgaacgacatggcgcctttgccaccgccgccctgcatctggcgcataaagaagatccagacgccaataagaagcagcatcgggaaccaggagatgaagatagaagccagcaggctcggctcttctggcggctcacctaccaccttgacgtttttagtcagaaggttatcaagcagcttaggatcgttcaccgggatgtaggtcgtgtaacggttactatctttcttggtaacgtttatctcacgtccgttgatacgcgcttcgcgaacctggtcctgattgacctcctgcaggaaggtagaataatccaccttgcggccattcgactcgctgggcccaaagctctggaatactgacatcagcacaacggcaatgaccagccagagtattaggtttttcgccatgtcactcaagggattaacctcatattacaactgtgttaaaaacagcgtcaggatactctatatccagcgtctttcaaactttcgtttgaaatctgccggttatggtttacgcccggtcgctacaatatacacttcacgcgaacgggcgcgagaagagtccggcttacgaactttgaccttcgtaaacagggagcgaatctctcttagatactcatcgaagccttcgccctggaacaccttcactacaaaactaccacctggcgctaatacatcacgagccattccaagcgccagttccaccagatacatggcccggggaatatccaccgccggtgttccacacatatttggcgccatatcggacatgacaacttgtactttactgtcacctacacgctcaagtaacgctttcaggactaattcatcacgaaagtcgccctgaaggaagtccacaccaacgattggatccataggtaaaagatcgcaagcaatgatgcggccgctgttaccgatctgcgtaaccgcgtattgcgaccagccaccgggtgcagcgccgaggtcaactatcgtcatccccggtttaaaaatcttgtcactttgctgtatttcatcaagtttaaaccaggcacgggaacgtaacccctttttctgtgcctgctgaacatatttatcgctaaagtgttcctgaagccaacgacttgagctggcagaacgctttttacctgtcatttaacattcccatttcgggttcatcgtacttcgcgacgtaaaaatcgacgcggtagtttggcgatatatgggagatggcggtagaatgaaccgttttcaatcccaacgtaagcaaaaaaatacgatgaatctgagtactaaacaaaaacagcacctgaaaggtctggcacatccgctcaagccggtagttatgcttggcaacaatggtttgaccgaaggggtactggccgagattgaacaagcgttagagcaccatgaacttatcaaggtgaagatcgcctcggaagatcgcgaaactaaaaccttgatcgtggaagctatcgtgcgcgaaaccggcgcctgtaatgtacaggtcatcggtaaaacgctggttctgtaccgcccgactaaagagcgtaaaatctcgctgccacgctaagaatatcctggttatcgacacaactttgtgtaaatcgagggttttctgcgggtagacgagcaaaatgccatgctccggacgctgataaaaggccgctacgcggcctttttcctttctttacaatccatcaacatcgtagcgttaaattcgaattaaaggtactcaaccttaagaatttcgaattcgacttccccgcccggtgtacggataaccaccacatcgtcctgctctttaccgattaaaccacgtgcaatcggcgagtttacagaaatcagattttgcttaaaatccgcctcgtcatcgccaacgatacgataagtttgctcttcatccgtatcgagattcagaacgctgaccgtcgaaccaaaaatcacccggccattgttgggcattttggtgatatcgatgacctgcgcgttcgacagcttcgcttcgatatccttaatgcgaccttcacagaagccctgctgttcacgggcagcatgatactcagcattttctttcagatcgccgtgctcgcgggcctcagcgatggccgcgatgatttcaggacgacgtacggacttcagaaaatccagttcttcgcgcagtttttcagcgccacgtaaggtcatcggaatagcttgcatttgttatacctctttttcattccttcatggagcagacaacgccgctccgcagccggtcaagacttgagcagggccggagcaaaagaaaaccgacccggaaagtcatccccaggccagcagcaattttcaatttgatacgtattttaccctgaagttcactatgggtcatcgtttactttacagggcgatgcaccgtagtatgacggactggtttcaggttgttagcgcgagattatgcgattttccagatttatcatcggattgactgccggtatagcgcttagcgctcaggcggcgaatattgacgagtacatcaatcagcttcctgcgggcgcaaaccttgcctttatggcgcagaaggtgggatccccgacgccggagatagactaccatagccagcagatggcgctccccgccagcacccaaaaagtgataaccgcgcttgctgcgctgctgcagctgggtccggacttccgcttcaccacgacgctggaaacgaaaggcagcctcgatggcggcgtcctgaaaggcgacctcattgcgcgctttggcggcgatcctaccctcaggcgtcaggatattcgtaatatggtggccacgctgaagaaagcaggcgtccagcgaattgaaggtaatgtgctgatcgatacctccatcttcgccagccatgacaaagcgcctggctggccatggaacgatatgacgcagtgctttagcgccccgccggcggcggcgattgtcgatcggaactgcttctccatctcgctctatagcgcgcaaaagccgggcgatctggcgtttattcgcgtggcgtcttactacccggtgaccatgttcagccaggtgcgtacgctgccccggggctcttctgaagcacagtactgtgagcttgacgtggttcccggcgatctgaaccgttacaccctgaccggctgtctgccgcagcgcagcgagccgctgccgctggcttttgccattcaggatggcgccagctacgccggtgcgattctgaaagctgagctgaccgacgccgacatcacctggagcggtacgctgctgcgccagacgctggcaaacgatccgggtaccgtcctggcaagtacacaatctgcgccgctgcacgatctgctgcgtattatgctgaaaaaatcggacaacatgatcgccgatacggtattccgcaccattgggcacgctcgcttcagcgtaccgggtacctggcgagccggttccgatgcggtacggcagatcttacgtcagcaggccggcgtcgatctcgggaataccatcattgccgatggctcaggtctgtcgcgccataacctcatcgcacccgcgacgatgatgcaggtgctgcagtacatcgcccagcacgataatgaactcaactttatctcgatgctgcctctggccggccatgatggttctctgcagtaccgcgcagggctgcatcaggcaggtgtcgatggcaaagtctcggcgaaaacgggctcactgcagggggtgtataacctggccggtttcatcacgacggccagcgggcagaagatagcgttcgtgcaatacctgtctggctacgccgtgcctccggccgaccagcgtaatcgccgcattccactggtgcggttcgaaagccgattgtacaaagacctctatcagaacaattaaagcaaaaagggccgcatcattggcggcccttttcgtttgttcaggattaacgtttgtagatgaattcaacgccttcttcgtcgtcttcatcccaatcatcatcccagtcttcatcatcttccacttcagcttcttcaagctgctggcggtgatagtcgtcccacataaactcgactttttcggcaggcttcgcttcttccgcatgcacaatcgggttttcgatgataaaggtcatcacgtcccagcacaggtcttttacgccctgctggctggccgccgaaatcaggtagaacttatcttcccagcccagcgcctgcgcgatagctttcgctttcgcttccgcctcagctttgtccatcaggtcaatcttgttaaagaccagccagcgcggcttagaagccagtttctcactgtatttttccagctcaccgataataatccgcgcgttctccaccggatcggatccgtcaatcggctcgatatcgatgagatgcagcagcacgcggcagcgctccaggtgcttcaggaagcgaataccgagacccgcgccttcagcggcgccttcaatcagccccgggatatccgccaccacgaagctcttctcgttgtccatacgcaccacgccgaggctcggcaccagcgtagtaaacggatagtcagcgactttaggcttcgcggcggaaacggcacgaataaaggtcgatttacccgcattcggcattcccagcatgccgacgtccgccagcagcatcagctccagctgcagatcgcgcttatcgcccggcgtccccatcgtcttttgacgtggagtacggttaacggacgatttgaaacgggtgttacccagaccgtgccagccgcctttggcgaccatcaggcgctgaccatgcttggtcatatcacccatcgtctcgccggtgccctgatcgatgacgcgagtccctaccggtaccttcaccgttacgtctttaccgcgtttaccggtacagtcacggctctgaccgttctgcccgcgctcagcgcggaaagacttctcaaaacggtagtcgatcagggtgttgaggttttcgtccgcctcaagccagacgtcaccgccgtcaccgccgtcaccgccgtccgggccgcctttcgggatatatttttcgcggcggaagctaacgcaaccattgccgccatcacctgctacgaccaggatcgttgcttcatcaacaaacttcattttactctccgtaaatcattcgcctgagcgggggagcggcacaaccgcttctcgcttacgccaccgtccccaaagacggtggccgacggcggaatacatcgcgcccgcaaccacgacaaacgcaccgagataacccatcaggttcaacagcggtctggcgaaaacgtcgggccaggccagtgataataaatctgaaaatagcagcgtaaacagcggcgttaaggtaatcaacgcgctcacctgcgccgcctgccagcgcgccatcgcttccgccagggcgccgtagccgaccagggtattgagcccgcaaaaaaccagacaggccagctgccagtcgcttaatgccagcacctgcgaaggcttcgctaatggcaatagcgatatcgtacataaagtgtacagcaaaaaaaggatttgctgtgatgccagacggcgcaataacaccttttgcgcgacgccgtagcacacccacaccgtcgccgcacctacgccgaaaattaccccccacgtgtagtccgtcaggcgggtaaaaatctcgatcaggctggtgttaaaaaacatcaccagaccgctcaccagcatcagcgctcccacaacctgagtgccgcgcattttctctttaaggacaaaaacgctggccaccatcatgccgaccggagacagctggccaatcacctgggaagcggtggggctgagatattgcaaggaagaactaaacagaatgaagttaccgaacaaacccgctgtcgcaataaccagcagtaccaaccaccgcggcttgcgaaaaatccgcagcgggggcagctttcttttcatggcgaggatagcgccaagaccaaaacttgccatcaaaaagcggtaaaacaccaccgtcggcggttccatcacttcaagaacctgcttcattgctatcggcagggcaccccagcacatcgccgtggtgagcgctaaaataatgccgatgccggcctgctgcttcatgcccgttttccctgcagaaaattttccggggtttcaatgtaaaaagccccgcaacacgttgcggggctttaatccgttaccggaccacgaaaaacttactcagcaacgatgctgatgtatttacggttgttcgggcctttaacttcgaatttcactttaccgtctgctttagcaaacagagtgtggtcacgaccgcaacctacgttagtgccagcgtggaatttggtaccacgttgacgaacgatgatgctacccgccagaacggattcgccaccgaaacgcttaacgcccaggcgtttagcttctgaatcgcgaccgttacgagttgagccgccagcctttttatgtgccatttaaatctctcctcaggtcttaggcgctgatgccagtaattttcacatcagtgaaccactgacgatggccctgctgcttacggtagtgtttacgacgacgaaacttaacgattttaactttctcgccacgaccgtgtgcaacaacttcagctttgattacgccgccctcaacgaaaggaacgccgattttaatttcttcaccgtttgcgatcatcagcacttctgcgaactcaacagcttcgccagttgcgatgtccagcttttccaggcgaatggtttgaccttcgcttactcggtgttgtttaccaccactttggaaaaccgcgtacatataaaactccgcttccgcgcacctcttcgtatgattcagagtgcgctataaatattcacaatagggcgcgaatattacgcaaaacgcgagcctttgacaagagcgatcagcgatcaacgcagaaaaaaaacacaactttcactccagcgtttaactacggcaatttttcagtacaatcatagcttcttttaattctgtcttaatccttctgtgatcccattcggatacgcggtaacaggacatttggcccggcttttgcgatgaatttagaaaaaatcaatgagttaaccgcgcaggatatggcgggcgtcaatgcgacaattcttgagcaactcgactctgatgttcagcttatcaatcagttaggctattacattgttagcggaggcggtaaacgcattcgcccgatgatcgccgtactggccgcgcgtgccgttggatatcagggaaacgctcacgtcgccattgccgcgctgatcgaatttatccataccgccaccctgctgcatgatgatgtcgtcgatgagtctgatatgcgccggggaaaagccaccgcaaacgccgcttttggcaatgcggctagcgtgctggtcggtgattttatctacacccgcgcctttcagatgatgaccagccttgggtcattgagagtgctggaagtgatgtcagaagccgttaacgtcattgccgaaggggaagtcctgcagctgatgaacgttaacgacccggatatcactgaagaaaactacatgcgggtcatttacagcaagaccgcacgtttgtttgaagccgcagcccagtgctccggcattctggccgactgcagcgcggaacaagaaaaagcgttacaggattacggacgctatctgggtaccgctttccagctgattgacgatctgcttgactacagttcagacggtgagcgtctgggtaaaaacgtcggtgacgatctgaatgaaggcaaacccacccttccgctgctgcatgctatgcaacacggcaacgcagaacagtccgccatgatccgtggggcgattgagcagggtaatggccgtcatcttctcgacgccgtactggaaacgatggcaacctgcggctcgctggaatggacccaaaaacgcgcggaggaagaggctgataaagcgattgccgcgcttcaggtccttcccgattctccgtggcgtgaagcgctaatcggtcttgcccacatcgctgtgcaacgcgatcactaacccctcctcttgctttcccgcgcaaaccgcgggaaagttccagtaagcgtcaaaaagccaagatccagccgtatcccttgatatattcctaatatcaaacccattaaaagaacttgttagaacattactggaacccgcggtatagtcattttgtcgtccattaaggacgccaggcatgtttattaccaggagaatttatggataagttcatcgactggcatccggcggatattattgccggattacgcaaaaaagggacgtcgctggcagctgaatcgcggcgtaatggtttaagttcttcaacgctcgccaatgcgctgacccggccctggcccaagggcgagctgattattgctaacgcgctggaaaccgatccgtgggtaatatggccatcgcgctatcacgatccccatacccatcagtttatcgacagaacgcaaatgatgcgcccaaggaagaacaacaagtaaagcgaggttgcagacaacagcccccggacaaacgtcagagggctgctgctacaggcttatatggcttattcgcctttgacgcgttcgatattcgcacccagcgcctgaagcttgtcttcgatacgttcgtagccgcggtcaatgtggtaaatacgatcgacaatcgtcgtaccttccgcaatacagcccgccagtaccaggctggctgacgcacgcagatccgtcgccatcacctgggcgccagaaagctgcttcacgccgtggcaaatcgccgtattgctttcgatttccgcatgcgcgcccatacggatcagttccgggatatgcatgaaacggttttcgaagatcgtctcggtgatcacgccggtgccctcggcaaccagattcagcaaggtgaactgagcctgcatgtcggtcgggaagcctgggtgtggggcagtacgcacgttgacggccttcggacgattgccgtgcatgtccaggctaatccagtcttcgcccgtttcgatatccgcaccggcgtcgcgtagcttggccagaaccgcatcaagggtatccggctgggcattgcggcacaggatcttaccgccagaaatcgccgccgccaccaggaacgtcccggtttcaatacgatccggcagaacgcggtagacgccgccgccgaggcgcgctacgccttcgatggtgatacgatcggtaccctgacctttgatcttcgcacccagcgtgttgagaaagttcgcggtatcgacaatttccggctcgcgcgcggcgttttcgataacggtcgtaccttccgccagcgtcgcagcgctcatgatggtcacggtagcgccaacgctgaccttatccatcacaatatgcgcgcctttcagacgtccattaaccgacgccttgacataaccctcttccagcttgatttccgcacccaactgctcaaggccggtaatgtgtaaatcaacggggcgcgcgccgatggcgcagccgccgggaagagaaacctgcccctggccaaaacgcgccaccagcggtcccagcgcccaaatagacgcgcgcatggttttgacgaggtcatacggagcacagaaaacgtcgaccgggccggcatcgatccatacggagccgttgcgcttaacgttcgcgcccagctggctcagcagcttcatggtggtatcgatgtctttcagcttcggtacgttttggatctcaatcggctcttcggctaatagcgcggcaaagaggattggcagggcggcgtttttcgcgccggaaatggtgacctcgccctgaagacgagttggcccctgaacacggaatttatccattgattctgttctctgttaagaattcacatacgctgcggggaacatccccacagcttataagccattaagtttgcggtctcgcgcccactcctgcggagtaaacgctttaatcgacagagcatggatgcggttatcggcaatatattccatcagcggggcatagatagcctgttgcttcttgacccgactcatgccgtcgaacatctcacccacagcaataacctgaaagtggctgccatcgccagagacgtggacttcctgaagggagagtgcgttcatcagcacggtctgaatttcatgattttccatgggctacatttatctgatagtgaaaacagcccaacatcttagaggaaagtggcgccgtcttaaacaagcaaaaagccccatcgaaaagtttgatggggctttcagaatagcttcagcactaaggcactgaaaaagttatgggatcatatcagcaggaaggttatacaacctgaccagggtttgcagattttcactcttcccggtcaatttagcctccccaccctgccgacgaaccagtgcgataaaatgcactaatagcgccagcccggcggtgtccacgcgggtcacggcgctcaggtcgatggcagacacgccatccgtcgcctgcgcgcgcgcttcccacagcaggaccagaagatcctggtccagctctccgcgcagcgccagcgtctcaccatcgcgagcccagctcagctgcccggtcattattttttctgttccagagtaatcggctgcgctgagcttgccttcagctgcgccgtcagaccatcaacgcctttagtacgcagcagatcgctccactcgttttgtttagtggtgatcatgctcaccccttccgcaatcatgtcgtacgcctgccagttaccggtctgggtatttttacgccactggaaatccaggcgcaccggcggacggccattcggatcaaggatggtgacgcggataggaacaatggtcgcgctgcccaacggctgctcaggggcaatctgataggtctgaccgtgatacatcgccagcgcctggccataggcctgcttcagatattcgcggaaggcggcaaaataggcttcacgctgcgccggggtcgcttctttgtaataacgacctaacaccagcgcgccggcgtatttcacctgaacatagggcagcagttcctgatcgacgatatcgcgcaggtagttcggattagcctgaatcttcggctgctcgttcttgaggcgatcgaaggttttctgcgccgcttcgtccatcagcttgtacggattggactgatccgcggcggtggccgcagtcaaaggtgcaatcaccagcatggcgaccattagtaagcgtttaaacatatcttaactctcctgaaattagtgcgtcgtgccggctggcggcgtagcgtcagtatgactctctccagcagcctgttcatcgccagaattcttattgtcgctacctttactgttataaaggaactggcctatcaaatcttccagcaccattgcggatttggtgtcctgaatggtaccgccatctttaaggatagtggttcccagctcaggatcttcaaacccgatgttcatcgccaggtactgttcgcccagcagaccggaagttcggatcgccagcgagctggtatccggaatatggttgtagcgctcatcaatatcgagcgcgacgcgaggcaggtaggtcttaggatcgagcgtaatatccgccacgcgtccaacgacaacgccgccaatccgcaccggagagcgcgctttcagaccgccgatattgtcaaaagtggcatagagccgataagtcggttcggtacgtaaagaggttacgtttgccgccttcaggcagacaaacagcgcggccagcagcgcaaccagtaaaaacacccctacccagatttcattttttctcgtttgcatgaactcaattcccaaacatcagcgcagtcagcacaaaatccagccccagaaccgccagcgacgcatgcaccacggtacgcgtcgtcgcccggctaatcccggcggaagtggggatagcgtcataaccgttaaataacgcgatccatgttaccgtaatggcgaaaaccaggctcttaatcaggcagttaaccagatccatccgccagtcaacggcattttgcatcgcgctccagaagaagccgccatcgatgcccttccagctgacaccaaccagcgagccgccccatacgccgaccgccacaaaaataatcgttaacaacggcagtgaaatcacccccgcccagaaacgcggagagatcacgcggcgaagcgggtcgaccgccatcatctccatactggagagctgttccgttgcgcgcatcaggccaatttcagcagtcagcgccgagccggcacgcccggcaaacagcagcgcggcgaccaccggccccagctcacgcagcagcgacagcgccaccagcatgcccagactggtttcggcgctataggtggtcaacaccagatagccctgcagacccagcaccataccgataaacagccccgatacaatgatgatcagcatcgatagcacgccaacgttgtatagctgacgcaccagcagcggcgcatgcttgcgaaactcaggcttgcccacaaccgcgttgaagagcattaatccagcacgcccgaacgtcgcgatagtttttataccgcgatgcccaagcgcggctagcgcatttaacaacatgagtcgcttaactccctttgcccaataaatcatgatgataatcccccgccggatagcggaacggcaccgggccgtcggcgataccatcaatgaactgacggacccgagggtcggcattttcacgcagcgactgcgcgctcccatgcgctacgacctttttgtccgccacgatatatgcaaagtccgcgatgctgagcacctccggcacatcatgcgaaaccacgatacaggtgacacccagggtgctattgagttcagaaatcagcttcaccagtacccccatcgtaatggggtcctgcccgacaaagggctcatcgaacatgattaaatcaggttcgagcgcaatcgccctcgccagggcggcacggcgcgccatgccgccggaaagctcagaaggcatcagcttcgcggctccgcgtagcccgacggcttccagcttcatcatcaccgtggtgtgcagcagcgcttccggcaaacgcgtatgctcgcgcagcggataagcgacgttatcgaacacattcagatcggtgaacagcgcgccggactgaaacagcatgctcatgcgcttgcggacggtatacaggcgcgaacgcgacatctgcggtacgttttcaccatcaaacaggatctcgcctttatcgggcgggatttgaccgccgatgagacgtaacagggtggttttgccgatccctgatggccccattatcgcggtgatcttgccgcggggtaccgatagcgagatatcatcgaagatcacgcgatcgcccctcgagaagcgaataccgcgcacttcgactagattcgccgaactctggctcataaaatcatccttactagacacccgtcgggctaagcatggcgctttctttcaccacaaacccaacatttttacagaatcttacccgcccgggttagcgaaagctggcatttgttttacttttggcacacataaagtcaaaattaagaattcgttacgctgcctacggacggccagcgaggcaacgattatacctgaagaaaggactttagatgctcttagcgacggctctgttaattattggtttattgctggttgtctacagcgccgatcgtctggtctacgccgcttcaatactctgccgtatgctggggatccctcccctgatcattggcatgacggtagtcagcatcggtaccagtttgccggaagtgattgtttccgccgccgcttccctgcatgggcaaaccgatctggcgatcggcaccgctctcggatcgaatatcaccaatatcctgctgatcctcggcctcaccgcgctgtttcaaccttttaccgtgcattctgatatcctgcgccgcgaattgccgttaatgttgctggtcagtttactggcaggatttgtgctgtacgacggccagcttacgcggatagacggcctttttttgctggcgctggccattctgtggctgctgtttacccttaaaattgcccgccttgcggaacgccagggtaacgacagcctgacccgtgaacagctggcggagctgccgcgagaaggctcgcttcccgtcgcgctgctctggttgggcgtcgcgatgattgtgatgccgatggccacgcggatggtggtcgataacgccacggtgctggcaaacttttttgctatcagcgaactgaccgtcggcttaacggtcgtcgctatcggcaccagcctgcccgaactggccacggccatcgccggagcgcgaaaaggcgaaaatgacatcgctatcggcaatatcattggcgctaatattcttaatattgtactggtcctcgggctccccgcgctgattgcgccaggcacctttgccgccgaggcctttacccgcgattatggcgtcatgctgctggtcagcctgatcttcgccgcgctgtgctggcgccgtaagcagcagcccggtcgccttgccggtgccctgctgctgggtggttttgtgctttggttagcgatgctgtactggacagcgccgctcttcgttgaatgattcgggataacattatgtcgcaaatagatttgccagcggattttgactttcaacgggcaggccgcgaggttctggacattgaacgtgaaggtctggcccagctcgatcaatacattaatgaagattttacccgtgcctgtgagaccattttccgctgtaccggtaaagttgtggtgatgggaatggggaaatccggccatatcgggcgaaaaatggcagccactttcgccagtaccggaacgtcatctttcttcgttcatcccggtgaggccgcgcacggcgatttaggcatggtaactccatgcgacgtggtgatcgcgctatccaactcgggcgagtcaaatgaaatcctcgccctgattccggtgcttaagcgccagcaggtggcgctgatttgtatcaccagccgaccggaaagcagcatggcgcgcgcggcggatattcatctgtgcgtgaaggtgcccaaagaggcctgcccgttagggctggcccccacgtcaagcaccaccgccgcgctggtcatgggcgatgcccttgccgtagcgctgctggaagcccgcggttttaccgctgaagattttgcgctatcgcaccccggcggcgctctgggccgtaagctactgctgcgggtcaatgatatcatgcacaccggcgatgaaattccgcacgttggcctggaggccacgctccgcgatgcgttgctggaaatcacgcgcaaaaatttaggcatgaccgccatttgcgatgatgaaatgaatatcatcggcatcttcaccgatggcgatctgcgccgcgtatttgataccggcattgatatgcgtaacgccagtattgccgaagtgatgacgcgaggcggaatccgcatccgtcccggcacgctggccgttgatgcgctgaacctgatgcagtcccgtcatatcacctgcgtgctggttgctgatggcgaccgtctggtaggtgtgatacatatgcacgatctcctgcgcgcgggcgtagtgtaagtaaggaaaaaataatgaataatgctgatgccctgatagcgacctgctacgggccggtaagccaggactttcttgaccgggcggcgaagatccgtttattgatacttgatgtagacggcgttttgtccgacggtcttatctatatgggtaacaacggcgaagagctgaaggcgtttaacgtgcgcgacggctacggtatccgctgcgccctgacttcagatattgaagtggcgataattaccgggcgaaacgctaaactggtggaagatcgctgccaaacgctgggcattacgcatctctaccaggggcagtcggataagctgctggcgtttcgtgaactactcaataaactggccgttagcgcggatgaagtcgcctatattggcgacgatctgatcgactggccggtgatggctgaagtgggtttaagcatagcggtagccgatgcgcatccgttgctgctcccgcgcgcggattacgttactcgtatcaacgggggtcgcggagcggtacgcgaagtgtgcgatttgctactattggcgcagggcaagctggatgaggccaaagggcaatctatatgagtaaaaccagacgttgggttatcattttactgtcgctggtcgcgctgatcctgatcggcctgaacctggcgagtacggacgataccacccagcaagcgatcaatcctgacgatccaacgtataccagcgagcatactgataccgtcgtgtatagccccgaaggagcgcttaactaccggctcatcgcggaacacgtggagtatttttccgaacagcagctctcgtggttcacaaaaccggtgatgaccacctttgataccaataaagtaccaacctggtctatcaaagcggataaagctaagttgacgaatgaccgcatgctgtatctttacgggcacgttgaggtaaatgcgctgacggcggattctcaactgcgcaaaattacgacggataacgcccagataaacctggtgacgcaggatgttacctccgatgacatggtgacgttgtacggaacaacatttaattccagcggcctgaaaatgcgcgggaacctgcgcagtaaaaatgccgagctgattgaaaaggttagaacctcatatgaaattcagaacaaacaaactcagccttaagattgcgctcgccagcgccttactggccgccagcctgtcggcacaggcaaagacaggtgataccgatcagccgattcacattgaatccgatcagcagtcgctggatatgcagggcaacgtcgtcacctttacggggaatgttgtcgtcactcagggaacgatcaaaatcaacgccgacaaagttgttgtgacccgtccgggtggagagaaaggcaaagaggttattgatggctacggtaacccggccaccttctaccagatgcaggacaacggtaagccggtaaaaggccgcgcgtcgaaaatgcattatgaactgcaaaacgactttgtcgtcctgaccggcaatgcgcatctggaacagatcgatagcaatatccagggcgacaaaatcacttacctggtgaaagagcaaaaaatgcaggccttcagcaataaaggcgggcgcgtgaccacggttctggttccttcgcagctgcaggacaagggtagcgatcagtcaaagaagggtaagtaattcgttatggcaacattaactgcaaagaatcttgctaaagcctataaaggccgccgcgttgtagaagacgtcagcctgaccgtgaattcgggcgagattgttggtctgctcggtccgaacggtgccggtaaaaccaccacgttctatatggtcgttggtatcgtaccgcgcgacgccggcaacattatcatcgatgatgaagatatcagcctgctacccctgcacgcgcgcgcgcgtcgcggaatcggctatttgccgcaggaggcctccatattccgccgcctgagcgtttacgataacctgatggcggtactgcagattcgcgacgacctgagcaacgagcagcgtgaagaccgggcgaaagagctgatggaggagtttcacattgagcatctgcgcgatagcctcggccaggcgctctccggtggtgaacgccgccgcgtcgagatcgcccgcgcgctggccgctaacccgaaatttatcctgctggatgaacccttcgccggcgtggaccccatctccgtcattgatatcaaacgcattattgaacacctgcgcgacagcggtcttggcgtcctgataaccgaccataacgtccgggaaacgctggccgtgtgtgagcgtgcttatatcgtcagccagggccacctgatagctcacggtacgccacagcaaatccttgaagacgagcaggttaagcgcgtgtatcttggggaagacttcagactctgatagggtagaggttacagacgttttagccggagatattggccctgaatatgaagcaaggtttgcaattaaggctaagccaacagcttgccatgacgccacaactgcagcaggcgattcgtctactgcagctgtccacgttagaactccagcaagaactccagcaggcgctggacagcaacccgttgctggagcaaaccgatcttcacgatgaggtagaaaccaaagaggccgaagatcgtgagtctctggataccgtcgacgcccttgagcagaaagacatgcccgaagagctgccgcttgatgccagctgggatgagatttacaccgccggaacgccgtcaggcaacggcgttgattatcaggatgatgaactgcccgtctaccagggcgagaccacgcaaagcctgcaggattatctgatgtggcaggttgaactgacgcccttcaccgataccgatcgcgcgatcgcgacctctatcgtcgatgccgttgatgatactggctacctgaccgttcctgtcgaagacatcgtggaaagtattggcgatgatgaaatcgggcttgaagaagtagaagcggttctcaagcgcattcagcgtttcgatcccgtcggcgtggcggcaaaagatttacgcgattgcctgctggtgcagctttcacagtttgccaaagagacgccgtggattgatgaagctcgcctgatcatcagcgatcaccttgatctgcttgccaatcacgacttccgtagcctgatgcgcgtgacccgcctcaaagaagacgtgctaaaggaagcggtaaatctgatccaatcgctggatccgcgcccgggccagtcgatccagactggcgagccagaatatgtcattcctgacgttctggtgcgtaaagtgaacgatcgttgggtcgttgagctcaattcagatagccttccgcgcctgaagatcaaccagcactatgccgccatgggtaacagtacgcgcaatgacgctgacggccagtttatccgcagcaacctgcaggaagcgcgctggcttatcaagagcctcgagagccgcaacgacacccttctgcgcgtcagccgctgcattgtcgaacagcagcaggctttttttgaacaaggtgaagagtttatgaaaccgatggtgctggcggacatcgctcaggccgtcgaaatgcatgaatccaccatttcacgcgttactacgcaaaaatacctgcacagtccgcgcggtatttttgagctgaagtatttcttctccagccatgtaaacaccgaaggcggcggcgaagcatcgtcgacggccattcgtgcgctggtgaagaaattaatcgccgcggaaaaccccgcgaaaccattgagtgacagtaagctcaccaccctgctatccgatcagggtattatggtggcgcggcgaaccgttgctaagtaccgagagtctttatccattccgccgtcaaatcagcgtaagcagctggtttgacccaaccgataaggaagacactatgcagctcaacattacaggacacaacgttgaaataacccccgcgatgcgcgatttcgttaccacgaagttcagcaaactggagcagtttttcgacaggatcaaccaggtctacattgtgttaaaagtggagaaggtgacgcaaatagcggacgccaatctgcatgtcaacggtggtgaaatccatgccagtgcggaagggcaggatatgtatgctgcgatcgatggtcttatcgataagctggcaagacagctaacaaaacataaagataaactgaaacaacactaattgtccgggcaatagcctacgccaaccgcccgcaggcggttggccaggagagctcaggtgaaattatgataaataacgattcggctctacaactgagcaatgtccttaaccaggaatgtacccgtagccaggttcactgccagagcaaaaaacgcgcgctggaaatcatcagcgagctggcggcaaagcagctaggcttaccgccccagatcgtcttcgaggcgatccttacccgtgagaaaatgggcagtaccgggattggcaacggtattgcgatcccacacggtaaactcgaagaggatacgctgcgggccgtgggcgtttttgttcagttggaaaccccaattgccttcgatgctatcgacaatcaacccgtcgatctgctgtttgcccttcttgtcccggccgatcaaactaaaacgcatctgcatacgctctcgctggtggcgaaacgtctggcagataaaactatttgccgccgcctgcgcgctgcgcaaagtgatgaagagctgtatgaaatcattactgaagcgggaagtaataatgaggcgtaacggaagtcgcaccttactctttttcgtactgaggagaaacggtacatggtactgatgatcgtcagcggccgttcagggtcggggaaatccgtcgccctgcgagcgctggaagatatgggtttttactgcgtcgataacctgccggttgtgctgttgcccgagctggcgcgctcgctcgccgacagaaacatctcggcagccgtcagtattgacgtacgtaacatgcccgagtcgccggaaatcttcgagcaggcgatgaaaaatctgcccgcagaattttcacctcagctgctgttcctggatgccgatcgtaacaccctgattcgccgctacagcgacacgcgtcgtttacatcctctgtccagtaaaaacctgtcgctggaaagcgccatcgatgaagagagcgacctgctggagcctctgcgttcccgcgccgacctgatcgtcgatacctcagaaatgtcggtgcatgagctggcagaaatgctgcgcacgcgtttattaggcaaacgcgagcgcgaactgacgatggtgtttgaatcctttggctttaagcacggtatacctatcgatgccgactacgtttttgacgtgcgctttctgccgaacccgcactgggatccgaagctgcgtcccatgaccggcctcgataagcccgtcgccgccttcctcgaccggcacacggaagttcacaattttatctaccagacccgcagctatcttgagctatggttacctatgctggagaccaataaccgcagctatttgacggtggccattggttgtaccggtggtaaacaccgttcggtttacatcgccgaacagctggctgactacttccgctcgcgcggtaagaacgtgcagtctcgtcatcggacgctggaaaaacgcaaatcatgaccgttaagcaaaccgttgaaatcaccaataagctgggcatgcacgctcgcccggcgatgaagctgtttgaattaatgcagaactatgatgccgaggtgctgctgcgtaatgatgaaggtaccgaagcggaagcaaatagcgtgattgcgctgctgatgctcgattcagctaaagggcgtcagatcgagattgaagccaacggcccacaggaagtggaggcgctggcagcggttatcgcgctgttcaacgccgggtttgatgaggattagctttcattcccccggcggcagcgtgccttccgggttaccggttgtgaaatcatcaatgcagcttattcgcctgcataaacccttccccacctaactgcctcatctggcgcaggatccacgcctgacggctgcgaacataacccgatggcgcatcggcgcggaagcgtattgggttaggcagcaccgcagcgagcagcgcggcttcggaagccgtcagtttactggccggtttgtgaaaatagcgctgcgacgcggcttcaacgccaaacgtcccctcaccaaattcagcgatattgagatagaccgtgaggatccgctttttactccatactgtctcaatgccgacggtcagtcccgcctccagcccttttctcagccagctgcggccgtcccacagaaacaggttttttgccgtctgttgcgacaaggttgaggcgccgcgaatgcggttctcattgcgttcattatgcgccagcgccttctcaatggccgtgacgtcaaatccccagtgttccgggaatttctgatcttctgcggcaataaccgccagccccatccacggcgaaatttcatccatgtccacccagtcggaatgggcgaggtaatgaaaatcccctgaaagccaggcgccgacctgtcgctccagcatcaccgccgaaaaaggaacaggtacgaagctaaacagggcaatcccgccgccccatagcaccgcacaagccaacaatagcctcagcacgaagcgcttaattaaccgcaacggcgaaaagcgaaatgtcatgccgtcagaaccaatacgcgagagaccagtttttcaatgccactcgccgcttcggcgatgttctgcgccagcatatacgcgggggtcgtcaccactttgttgtcttcatccaccacaatatcgtcgaccgggcaaggcacgtgttcagcccccatctcctcaaccgcgtcggcagtatcaagatcggtaccaatggtcacgcgtagcggtatagcaaatattttcggcaacagtgccggagcgatacagataaagcccaacggtttacccgcctgatgcatcgccagcgccagcgccttgagatcgcgatcgacttcacattcgctcccctgtgaagcaaagctgctgaggttctttgctgcaccaaaaccgccggggacgatcagcgcatccagcgcatccgctcgggcattggccaaaggctgaatctctccgcgtgcgatacgcgccgcttccacgagcacattacggctttccgcctgcgcttcgccggtcaggtgattgataacatcggtttgcactttatctggcgcatagcagatggcctgagcgccgctgcgggctattgccagcagggtaatgacggcttcatgaatttcacttccgtcataaacgccgcagccgctcagcaccacaccaattttcttcatcacatcagccccttagtacaagtttatgaaagcagtcaaaaattttgaattactcgctatgcttcacatattttactgtttcatgtaacaaactatttaaggtttgctatcttaatgagcgagtaagccaaatcctcaggttgcgccgtgtaaaaaaatcactcaaatgattctggcgtaacgaccagttccctggtgttggcgcagtattcgcgcaccccggtttatccggggtcattttttatctgccgccgcgacccacgctttcagcaccgcgacatcgttttgccactctgatttcatctcttcaacccattcacccacgttatccgaccacgcaggtaaatccggcgtttgaatctgctgccctaactgctggatatggcgcaaaccgattgagcccgcagcccctttaatcttatgaccctcatcgacaatgcctttctggtcgcgagcggttaaattggattccaggaccgccaggtagcccggcatcattctttcaaaaacggccagaccgtcattaatcagcttcggccctaccagttcgatatactgctcaagcatcggaatatccagtacagaagccgatttactgctatctacagatggcattgcattctcctcttcttccggcgcatcccagaattttttgataatcgcagttaatgccggaaccgataatggcttactaagaacatcatccattcccgcatccagatactcattcttgttcttcagcacgttagcggtaagcgccaccagcggcgggagctcatcggcggcaaagcgttgtttcagctgacgagaaatatcgagtccagtcatatccggcagctgaatatcaagcagaaccagatcgtactcgccgggtacaaacatctccagcgcagccttgccggtcatcgccacatccacgctgttgcccagcttctccagtaccgagcgcgccacgatcacgttgagctcaatatcttccaccagcagcacgttcagcgcaggtaatggcatttcatcttccgccagcgtgtcctcgacctcttcagccacggccggagcgtgtacggtaagcgtaaaagtcgcgcctttacccgggaggctggtaacgcaaatatcaccgcccatattcctcgccaggcgccgcgatacggcgaggccgatgccggtgcccgtcgctggcttgccgccctggctatctttcacctggtaatacatggcgaaaattttatcctgttccgcttcagggatgccaatccctgaatcttctacttcaaagtgcaggatatcgccttcgtcatagcgcacgcggacgttcacattcccgccttgcggagtaaatttcacggcattactaataagattccacaagatttggcgcaaacgcgttccgtcggtgatcactttatgcggcagcggaagcgtggggtccagcacaaaatgcaggcctttctgctgcgcctgcaggccggagaggttttccaggtcggccaggaagccggtaaagtccaccggctggttatccagctgaattttacgccgctccatcttatccatctcaataatatcattgaagatattacccagcgttaccgctgagacgtggatggttttcaggtatctttcctgttcatcggtaagatcggtatccagaaggattcggctaaggcctacgatgccgttaagcggcgtacgcagctcatggctgatcgttgagataaaggtggtcttatcacggctggcccgctccagcgcgtcctgatagcgcttacgctccgtaatatcgcggccaaaccccatcaggccgcgccgcttaccgacgcggtcataataaggcactttgcggatttcaaagcaggccttgcgcccgtccggataatccagccactgctcgtaggtgagcgatacgttatggcggaagactttctcatccgtctccagcactttctccgccacctcttcgctgtaaacatcctgcggcttaagatgaataagctgcttttcacttttaccggtcaacagttccatcgctcggttacagccagaaaactctttatcttcattacgatagaaaaccaggtccggagaggcatccaggaaggagcgcaagaaggaggattgctgttccagctgaatttgcgcctcttcacgctctttcatctcaattttcagctgctcaagcgtcgtttcacgttccgcttccgccttttcacgttcgccgatttcctgattaagctgggcgatgttgtccttaagctgcacattcagcttgagatcgcgttcgcgcatctcctccagtttctccaccagcctcgagaggcgctgccgggactcttccaactgctcaaccaccaccgacaggaaatagaccgcccacggggtaatcagcaagccaaagaagatggagcggatcacatcaatactttccacctggccgtgcagcaccatcgtcacggccatctgcacaacgatcgccagcaccaccagcgcaaaggccagcagcattgaaaagcgcaccagacccagcttcatcatcaggtcaacataatactgcgccagcatacggatttgcttcataagggattccttcgcgacaacttcgcacaataatactcaattctgagcaagacgctgtaagttgtgccaaaaatgcgggaaggattgtagttacgcgcctgacggtggagagccgtcagccggaaatgacgttattcggcagcagccggagagatccagcaacgcccgatggctgacccctgcacgccgtattcattgagatatttatccagctcaaccatcccggtccaacggttctcacaccacagcggcgccagcagcgtcgggcgtcgggcgctggcggagatacggtgataaatcacgtctggcggagtatggcgaatcatctctcctgcggtgaccgtatacgcttccagcgcaataccgtttaacctgccggcctgccacgccctggccataatactgcccttcacaatatgaagtggatgcagcttaatgccgtctacgccggtctccaccacctgcgctaaggtctccaggcattcacgctgcccttcgcccggcaggcccacgataaggtggctacacactttgaggccgcgctcgcgtgccagacgggtggttcgctgatagcaggcaaaatcgtggccgcgattgattcggtgcagcgttttatcatgcgcggtctgtagccccagctcgagccagacttcatacccctgctcccgatattcagtcagcagatccagtaccgcgccggggacgcagtccgggcgagtccctacgcatagcccgacaatattcgcctggctgaccgcctgctgatacatggcgcgcagcacctgcacctcggcaaaagtgctggtataagcctggaaataggccagatagcgctttgcgcgattcacccgctgcgcctgatgggccagctgttcagcaatcgagcggtgctgctgctcttcatcggcaaaagaggcgacattacagaacgtacagccgccgcgaccaatagtgccatcgcgatttgggcagctaaatccaccatgcagcgtcagtttatgaaccttttcaccatagcggcgcataagatccccaccaaacatattgactaatttttgtaactgcataatctgatagaccggccttaagaaaggggccaagcctgccatttttagctaccgacggcgatgacctggatcaatcgtcaacgcggccgcctatctcattgcataaacactcaagataactgcaatttaattcatccttatggtaatgagttttccttatatatagccgctgatttgccattatctttaccagggcataaaacagtatcagtcaccgcaaatcaaacaaaaaccagtttaaaaaactgcaatgaaaaaacaattcagcacagaaggataatgtctcgccgtcgatatagtgagacagatcacactcaattatgacgaccggtacgtttccctggcatttaaaatgccattattttcttaaaaatcattaaattaggtgttgtatagcacatttttgtataaataagattgccatttgacgtatgtgtggattcccgataagttgggaatccgctggaagctttctggatgagtgctctgctcatcatatttatgcagtaattgagattccctcttaacagcaagtcctcaaacttgtgtaccgatgcgaaaaggatttaaagagggcgaatgcgaggtgtaaaccccgtcgccatgctctttctgtgcccgtgcgcaatcggtatcggagggtgtcccgtagagcctggggaggttcactgatatgttgtacgataaatcccttgagagggataactgtggtttcggcctgatcgcccacatagaaggcgaacctagccacaaggtagtgcgaaccgctatacacgcactggcccgaatgcagcaccgcggcgcgattcttgccgatggaaaaaccggcgacggttgtggcttgctgctacaaaaacccgatcgtttcttccgaattgttgcggaagagcgcggctggcgtttagccaaaaattatgccgttgggatgctgttccttaataaggatcctgaactggccaaagcggcgcgccgcatcgtcgaagaagaacttcaacgcgaaacgctgtctatcgtcggctggcgcgatgtgccgaccaatgaaggcgttctcggtgaaatcgccctctcctcgctgcctcgtattgaacaaatctttgtgaacgccccggctggctggcgtccgcgcgatatggaacgccgtttattcatcgcgcgtcgccgtatcgaaaagcgtctgcaggaagataaagatttctacgtttgcagcctgtcgaacctggtcaacatttataaaggtctgtgtatgccggcggatctgccgcgcttctacctggacctcgcggacctgcgcctggagtcggcaatctgcctgttccaccagcgcttttccaccaacaccgtgccgcgctggccgctggcgcagccgttccgctatctggcgcacaacggcgagatcaacaccatcaccggtaaccgccagtgggcccgcgcccgtacctataagttccagacgccgctgatcccggatctccacgacgccgcgccgttcgtcaatgaaaccggctctgactccagctcgatggataacatgctggagctgctgctggcgggcgggatggacattatccgcgcgatgcgcctgctggttccgccagcctggcagaacaacccggacatggatcctgagctgcgttcgttctttgactttaactccatgcatatggagccgtgggacggcccggcgggcatcgtgatgtcagatggtcgtttcgccgcctgtaacctcgaccgtaacggcctgcgtccggcgcgctatgtgatcacgaaagataagctcatcacctgcgcctccgaagtcggtatctgggattaccaaccggatgaagtggttgaaaaaggccgcgtcggcccgggcgagctgatggttatcgatacccgcgaggggcgtattctgcactccgcggaaaccgacaacgatctgaaaagccgtcacccgtataaagagtggatggcgaaaaacgtccgtcgtctggtgccgttcgaagagctgccggatgaagaagtcggtagccgccagctggatgatgataccctcgccagctaccagaaacagttcaactacagcgccgaagagctggactccgtcctgcgcgtactgggtgaaaacggccaggaagcggtcggctcaatgggcgacgataccccatttgcagtgctctccagccagccgcgtatcatttacgattacttccgccagcagttcgcgcaggtgaccaacccgccgatcgacccgctgcgcgaagcgcacgtcatgtcgctggccaccagcatcggccgtgaaatgaacgtcttctgcgaagcggaaggccaggcgcaccgcctgagcttcaagtcgccgattctgctgtactccgattttaaacagctgaccaccatggaagaggagcactatcgcgccgacgtcctggatatcacttttgatgccaccgaaaccacgctggctgaaaccgtgaaggcgctgtgcgataaagccgaacaaatggtgcgcagcggtaccgttctgctggtgctctctgaccgcaacatcgccaaaaaccgactgccggtaccggctccgatggcggtaggcgcgatccagacccgactggtcgataagagcctgcgctgcgatgccaacattattgtcgaaaccgccagcgcccgcgatccgcaccactttgccgtgctgctcggcttcggcgcgacggctatctacccgtatctcgcctatgaaaccctggcgaagctggtggataacaaagccatcgacaaagcgtaccgcgcggtgatgctgaactatcgtaacggcatcaacaaaggtctgtataagatcatgtcgaagatggggatttcgaccattgcctcctatcgctgctcgaagctgtttgaggcggtcggtctgcatcgcgaagtctccgacctgtgcttccagggcgtcgtcagccgtatcggcggcgcgggcttcgaggatttccagcaggatctgctgaacctgtcgaaacgtgcctggctggcgcgtaaaccgctggatcagggcggcctgctgaaatacgtccacggtggcgaatatcacgcctataaccctgacgtggtgcgcacgctgcaacaagccgtacaaagcggcgaatacagcgattaccagcggtacgcgaagctggttaacgagcgcccggcggcaacgctgcgcgatctgctgtgcgtaacgccggacggaactaccgtgagcctggacgatgttgaaccagcgagcgagttgttcaaacgcttcgataccgcggcgatgtctatcggcgcgctgagcccggaagcgcacgaagcgctggcggaagcaatgaacagcatcggcggtaactccaactccggcgaaggcggtgaagacccggcgcgctacggtaccaataaagtctcgcgcatcaagcaggtcgcctccggccgcttcggcgtgaccccggcttacctggttaacgccgacgttattcagattaaagtcgctcagggcgcgaagcccggcgaaggcggccagctgccgggtgataaagtcaccccctatatcgccaagctgcgctattccgtacccggcgtaacgctgatatccccgccgccgcaccacgatatttactctatcgaggatctggctcagctgattttcgacctgaagcaggttaacccgaaagcgatgatctccgtgaagctggtttctgaaccgggcgtcgggactatcgccaccggcgtagccaaagcctatgcggatttgatcaccattgccggctacgacggcggcaccggcgccagcccgctctcttccgtgaagtatgcgggttgtccgtgggaactgggactggtggaaacccagcaggcgctggttgccaacgggctgcgccacaaaattcgtctgcaggtggacggcggtctgaaaaccggccttgatatcatcaaagcggccatcctcggggctgagagcttcggcttcggtaccggcccgatggtcgcgctgggctgtaaatatctgcgtatttgccacctgaacaactgcgcaaccggcgtagcgactcaggatgacaaactgcgtaagaaccactatcacggtctgccgtttaaggtcaccaactactttgaattcatcgcccgcgaaacgcgcgagctgatggcgcaactgggcgtgaagcgtctggtggatctgattggccgtaccgacctgctgaaagagctggacggttttaccgccaaacagcagaagctggatctgagcaagctgctggaaaccgcggagccgcatcccggcaaagcgctgtactgcacagagaacaatccgccgttcgacaatggcgtactcaatgctcagctgctgcagcaggcaaaaccgtacgttgacagcaagcagagcaaaactttctggttcgatatccgcaacaccgaccgctccgttggcgcatcgctgtccggctatatcgcccagacccacggtgaccagggcctggcagccgatccgattatcgcccactttagcggtaccgcgggtcagagcttcggcgtgtggaatgccggcggcgttgagctgcatctgaccggcgacgcgaacgactatgtgggtaaagggatggccggcggcctgctcgccattcgtcctccggtaggctcggccttccgtagccatgaggccagcatcatcggcaacacctgcctgtacggtgcgaccggcggtcgtctgtatgctgcgggtcgtgcaggcgagcgtttcgcggtacgtaactccggtgcgatcaccgtcgtcgaaggcattggcgacaatggctgtgaatacatgaccggcggtatcgtctgcgtgctgggcaaaactggcgtcaactttggcgcaggcatgaccggcggctttggttacgttctggatgaagacggcgacttccgcaaacgcgtgaaccctgagctggtagaagtgctggacgttgactctctggccatccatgaagagcacctgcgcggtttaattaccgagcacgtgcagcttaccggttcgcagcgcggtgaagagattctggctaactggccggccttctcagcgaagtttgcgctggttaaaccgaagtccagcgatgttaaagcactgttgggtcaccgtagtcgttccgcagctgagctgcgggtgcaggcgcagtaaggggttaagatgagtcagaatgtctatcaatttatcgacttacagcgagttgatccgccaaagaaagcgctgaagatccgtaaaattgaatttgtggaaatttacgagccgttttcagaaggccaggctaaagcgcaggcagaccgctgtctgtcctgcggcaacccgtactgcgaatggaagtgcccggttcataactacatcccgaactggctgaagctggccaacgaagggcgtatttttgaagcggcggagctatcgcatcagaccaataccctaccggaagtgtgcgggcgcgtttgcccgcaggaccgcctgtgcgaaggttcctgcacgctgaacgatgagttcggcgcggtaaccatcggtaatattgagcgctatatcaacgataaagcgttcgaaatgggatggcgtcctgaccttaccggcgtaaaacaaaccggtaaaaccgtcgccatcatcggcgcgggcccggcggggctggcgtgcgccgacgtattgacccgtaacggcgtgaaggcggtggtcttcgatcgccatccggaaatcggcggcctgctgacctttggtattccggcctttaagctggaaaaagaggtgatgacccgtcgtcgcgagatctttaccggtatgggcatcgagttcaaactgaatatcgaagtgggccgcgatgtacagctcgacgatctgctgaaagattacgacgcggtgttcctcggcgtcggaacctatcagtctatgcgcggcgggctggaaaacgaagacgccagcggggtctttgatgcgctgccgttcctcatcgccaataccaagcagatcatgggctttggtgaaacggcggatgaaccgtacgttagcatggaaggcaagcgcgtcgtggttctcggcggtggcgacaccgcaatggactgcgtgcgcacctcgatccgccagaacgccgcccacgtcatctgcgcctatcgccgtgatgaggagaacatgccgggatcgaagcgcgaagtgaaaaacgcgcgtgaagaaggcgtggaattccagttcaacgttcaaccgctgggcattgaagtgaatgccaacggtaaagtctgcggcgtgaagatggcgcgtacggagatgggccagccggatgcaaaaggccgccgccgcgcggaaatcgtggccggttctgagcatgtggtgcccgtcgatgccgtggtgatggcgtttggtttccgcccacacagcatggaatggctggcgaagcacagcgtcgagctcgattctcagggccgcgtgattgcgccggaaggcagcgacaacgccttccagaccagcaacccgaaaatcttcgccggtggcgatatcgttcgcggctccgatctggtagtgacggcgattgccgaaggccgtaaggcagctgacggcatcctgaactacctggaagtgtaatgcgaaaatccggatagcagcgttatccggctaaatgacgctaagcccgatggtaatcccatcgggcttatttatgcgcttaacaaatcagagcgcactttaatcaccacttttttaatctctgcggactctgttattacgcatccaggcttgtgtggctcacccggcataaacaccaaaaacatccctggcttcaatgtcacagactgctcatgagctatctccgcgcagagttgataatcatcctccgcgcgccattcgtcgcattgccgcgcagagccaatcgtcccataaaaaatccgctcctcacctgtcagcagcagctgaatatcaatatatcgttgatgcagttccgcttttttccctttcggaggaagggggacaaacgccataacgttcataaagagattctcgctacgcagttcatagcggcccggtgccttgtcctgcggcctggcggctaatgccaacgttaacgcttccgccagcaccggatgcaaccctgtatccgccagcgtcccgatatctcccatcagcatcatttatctcctctggctaacaacgccgctcccagcaatccggcatcatgtcgatagtgcgccgtactcagcgttacgtgatacaccgatggttcccaggccaggtacttccgtatccgttccagataaccagcagccatgccgacgctgccgccgaccaccacatgctgacagtcggttattgcttttatatcggcgatcagtcgcgctacgacatgcgcagagcgttcaagcagccccagggcctgcgcatccccgcgagccgcgctggtaaagatggctttcgcatcacagccggcaagcgcgccccgcgcggctgccgaaatccctcgcccggaagcaatcgcctccacgcagcctacccgaccgcagccgcaaagcggtccgtcagggtcggccagcgtgtggcccagatgcccagccaaaccgccggcaccggtaagcaaccttccgttactcaccacgccgccgccaaccccggtggagacggtaataaacgccatatcgctgaccttaccagcaatagcccggtattcagcccaggcagccgcctgcgcatcgttcaccgccagcgtcggcaggtccgttagctcctctaatgcctgcaccagcggaaagtgcataagtccacccagattctgcggattaattgcgaacagatgaccgtcacgaataatacccgtcgaggctatcgcaacgcgcttcgcccgactgtataaaggcccaaccagcattgctaatgcagcgcgtagcgcatccggcgttttgctggcaggggtggaaagttcgcggcggtcgcggatcagcatgtcatcagccaccagcgctgcagcgagctttgtaccgccaatatctatcgccagcgtagtcatggctgagcctcttttaacgccgcgttataccactggcaaatatgttcaagacgggtaatcgctgaaccgacggtcaccgcccacgcccctcggcgcatagcttcagccgcctgagctggcgtgttataacgcccttctgcatttacccggcagccggtttccgtcagcgcttttaccagttccaggtctggctcatccggcgtatatgccgtggtatagcccgataacgtagtgcctatgatttccacgccgagagagtgacaggccaggccatccttcagagaagaacagtcggccatcgctacccgattgtgctgatgaatacgcgccactagcattgacacgggcacaggacgctcacgctcggttccatcaacggcgataatatcggcgccggcctgcaccaacgcatcaatatcttccagatatggcgtgatgcgtaccggtgaatcatctaaatcacgtttaataatgccgataacaggccccctcacccgcgaccgggtcgcgcgtaggttctctacaccttcaatgcgcaacgcgactgcgccggcctgctccgccgccagcgccatcgcagccacgatctccggcttatccaatgggctaccgggtaccggctggcaggaaacaataagaccgccgtttgcgctaatgcgtaaatccagttctttaagcaaagacatactcgctccctgataaatttgttcgcccggcaccaccgccggtctgtcgctatctggtcttaactaatccgcttttgtcaccgctaaaaggcgccgcaccgctcagtggtttaccatcgattgcatcatgagttcgtatcgcttccggacggatccagcgctgtacgcgggacggcatatccagaccaatcaacaggatcacgacgaacgtcaggccaaaagagagtgaacccagcgcggtgcccagatcgagacgctgggcgatcagggcgccgagcactggcgcgatcgcgccgcccagcgcccccacgttgtaggtaaaaccaagaccggccgcacgctgatcggtgtcgaaataaccccctatcagtttcggtaagatcccggagatcccctgccctaacatctgctggaaaaacagtagcagcccaaggacccatatgtttgtgccgccgatagcaaagaccggaataatcaacagctgtgaagccagcagactacaaacgtaggccttacgcgttcccagccagtcaccgagaaacccgcccacgcagcagccgaccgccgcaccaaagccgctgaaaaacagaatcttcgccacagtcgcggggtcataggccagctctgttttcagataagtcggcagcagtgcctggataggccatgaataaaggaaggcgaaaagtaccacgaccatcagcatcacgcccgtaggccagcgcttgccgctgctctgcaccataaagctgataaatatcacggcacacatcacgcccagcagtagcacgataccggcgttttgcaggttgcccgcaaagcagaaccatagcgcaaccgctgccactatggtcattagaatattaataacccgatgtttgccccgataaaggatatcgaccatggtctgtactggcgctttgccctcatgcttctctttccagtcttcagcttccggaatgtttttccgcagccagagagcaaatacgataggtacgatgccgataaaaaacagcgctcgccaaccccaaacgggtaccaccagactgtaaacctgagcagcaatcacagcgcctacagagaacccagagatgagaaaaccgctagccttattacgtaaatgtcggggccagctctcaatcacataagtggcgctggaaccatactctcccgccatgcccataccgataaccagacgagcaataaacatggtggtatagccaggcgcaaaaccgcaggccagagtaccaagggaaaaaagtataatgctgctgaccatagccaggcgtcgaccataacgatctcccatcgcgccgagcatcaggccgccgaaccagcgagagatgaaagccgctgagatgaggctggcagcctgaacggttgtcaggccgaaatccccctgaacttcggtaagtaccagggcgattaatacaaaatcaaaaccatcaagcaaatatccgagccaggcagcagagaacgcacgccactgaggacgactgagatggcggtaccacgggatgttctgggtcgttgcactcattttactctcccgacgattttcgttgtcattccgggagcgcttcgcttacccggtcaggaaaaggtaaatcgctgagcggatagcgttttcgccacccgaccaccgttcagccgcgttcctgcattagctgctgcgccagcgctttcagctccggcagataattttcatctaccggaccaaaaggcttacggcacagcggctcagcaataacatccatatagtgcagcacactcttcaatccacggaatacgccggttttaatcagcagatcgattgccttgttacatccgctttgcaactgctgcgctttgctaacatcaccctctttcaacgcctgtacaatgccctggtaacgccaggccataatgttgtaagtactaccaattccgccatcggcgcccgccaacaggccagaggcaaatatctcatcgtaaccgttgtacagcaccagatccggatgcgctcgacggatctgctccatctggaacagatctcccgaagtctgctttaacgcaccaacgccaggcaaagtcactaacgtattaatttgttcgagagtcagcttaacgccgctgagcgccggaatgttgtacaccaccatcggtaaaccattagcagactcaataatggcccgataatgcgcacagtgttcttcaaaactaaacggataataaaacggtgttacggcggatacggcatcgaagccatagcctgcagcagcccgagccagctgctggctttcgagggtactcacacagccgacgtgggcaatgagagccattttacctttcgcctcctccgccacgatctccagcacttcctggcgctctgagccgctctgaacaaaggcttcaccggtcgagcctcccacatatagcccatcaactccctggctcagattaaaacgaaccagccgacgcaggctgtttttatccagtttttgttgactatcgaatggcgtaagcaacgccgccataaccccacgtaaattaactgccataacgacctcatctgaacttttacgattaactatgtacctttatacctgttataccagatcatttaataagcatagtaacagagatcgcttataatgcgatctgcttcactaaacgctcgtcatgagcgaggggatcgtttgcggggctgagctttctgaccgaaggcgtgccaggtagcggatacgctgttgagatgggtctgtagggcgcgatcggcttcatcaggatcgcgacgacgaatggcgtcaacaatagcgatatgctgttgatagctcacgctgttatgttcgtgcagctcacgttctggcaccttaggccgggccgcgattagccagtccagcagtgccacatgaatagccataaagattggattaccggggatttccgccagcacccggtgaaattcaacgtcagaacggataaacagggcattgtcatcaagcgactggctgttaatttttagcgcctgagcgagtttttcaagctgcttttcgctggcatgctctgcggcatagcgcaccagactcgactcaaaaaacaggcgcagctgttcaaagtgcgctattccgcccgggtgcgataaaaaatctttcgccatgccggagagctcaccaatgatggtatctgcagaaggccgcgacacgcgggcgcgctcgccgttattaatctgcaccagccccttgcgtttcagcgccgccagcgcttcacgaaccgatggacgtcccacgttaaaaaacgtcatgagctcacgttccgacggtagctgctctccttccgcaaactcccggcgccgaatcatctgctcaagctcttcttccaccatttcagacagctttttgcgcgccagaggacggcggcccagagtgttgccaatggaggatggggtatcttcggcttgtggatcaaatgcgctcatagggaccattgtgtgatttgtgacagcacgtgacggctgctccattttaacacaggaattttgctgagatcataaaacaggccccgaagggcctgataaacattatttaacgacgcgcagcgccggacgcccgccgcgaggcggtggcgtatcgtcgggatcgtcgtcgtgattatccggcttatcgccatcgatcaccgacatgaccgtttcgctgtcaggcagctcttcgtcatcgttcaggctagtgacatcttcatcataagccgcttctggttcgaacatggttcccgcaccattctcgcgcgcgtaaaccgccagcacggccgccatcggcacggagacattgcgcggcacgccgccaaagcgcgcgttaaaacgcacttcgtcgttggccagttcgaggttaccgacagcacgtggggcaatattgagaacaatttgcccatcgcgagcgtactccatcgggaccattacgcccggcagagtgacgtcaacgaccagatgcggagtcagctggttatccagcagccactcatagaacgctcgtaacaggtacgggcgacgcggcgtcagctgtgatacatccatcatttagccccgaccgagacgcatttcacgttcggcttcagttaaagaagcgaggaaagagtcgcgctcaaacacgcgagtcatatagcctttaagctctttcgcgccagcaccgaccagctctacgccgagaaccggcagacgccacagcagcggtgccagatagcagtctaccaggctgaactcatcgctcaggaagtagggcttctgggtgaatactggcgcaatcgcctgcagttcttcacgcagctgcttacgcgcagtatcagcctgcgcagcggtaccggtctgaatggtattcatcaacgaataccagtccttttcgatacggtgcatgtacagacggctttccccacgcgccaccgggtaaaccggcattagcggcggatgtgggaaacgctcatccaggtattccataatgatgcgagattcccacagagtgagctcacgatccacaagcgtcggtacgctttgattcgggttgaggtcaatcagatcctgaggcgggttgtccttctccacgtgctctatctcaaaactaacacctttttcggccagcacgatgcggacctgatggctatagatgtcagtaggaccagaaaacagcgtcattaccgaacgtttgttggcagcgacagccatgaaaacctccaggtatattcagaatttttgtactgctgccgaccacgcatggccagccagatgtaaaaaccccatttgcgtgacttcatttcgttcgtcatccaaacaaaaaatgaacaatcacctgcatttgggcagaaaattggatgatagtttaccagattttgaagacgttgtggtgaggggattctggaaatgctgaaaaagtggtaataatggggcgtttgtagagggaaaatggcaaatttatccataaaaaaacccgccgaagcgggttttttcgtaaattgttctgcgtgagcagaaaacaattaacgtttggagaactgcggacgacgacgtgctttacgcaggccgactttcttacgttcaacctgacgagcatcacgagtaacgaagccagctttacgcagttcgccacgcagggactcatcgtactccatcagagcgcgggtgataccgtgacggatcgcaccagcctgaccagagataccaccacctttaacggtgatgtatagatctaatttctcaaccatgtcgaccagttccagcggctgacgaactaccatgcgggcagtttcacgaccgaagtactgttccagagaacgctggttgataacgattttaccgttgcccggtttgatgaaaacgcgagctgcggaacttttgcggcgaccggtgccgtagtattgattttcagccattgcctataatcccgattagatgtcaagaacttgcggttgctgtgccgcgtggttgtgctcgttacccgcgtaaactttcagcttacggtacatagcacgacccagcgggccttttggcagcatgcctttaaccgcgatttcaatcacacgctcaggacggcgggcaatcatctcttcaaaggtcgcttctttgataccaccgatgtggccggtgtggtggtagtacattttgtcttcgcgcttgttgccggttacagcaactttttctgcgttcagaacgatgatgtaatcaccggtatcaacgtgcggagtgtattccgctttatgcttgccgcgcaggcgcagagccagttcggaagccagacggcccagagttttaccggtcgcgtcaacaacataccagtcgcgttttacggtttctggtttagctgtaaaagttttcattaaaagcttacccaaataaataagttacacgttggtgaacacccaaacgtttagtcagttgaggttcacacgacattgtccagcaaacctaccccttcgaatagcctatgccggcacatagaaagttttgggaaaaaaaccttctcgtaacgtggggtcgcaagattatagagaagtcggggtcaaagatcgacccctttatgtgatttgtccccggttttaccccgccaggtgttcccgcttcagatactcctcgctctgcatctcctgcaggcgcgataaacagcgctggaactcgaactttaatctctcgccctgatagatctcatacagcggcaccgccgcgctgaccaccagcttgacgtggcgctcatagaactcatcgaccagggcgataaagcgccgcgcctcgctctccatcagcccggtcatcaccggcacatcaaagagcatcacggtatgaaacagacgcgagagcgcaatatagtcgtgctggctacgcgcatccacgcacagcgtggcgaaggaagccgccagcgtctggttctcaacgcccagcgtcggcagcgggcgatggttgatctccagcgttggcatctgctcgcgcttcgcccccgccagcgccagccacagtttatccatctgctgctgcgtctcagcgttcagcggcgacagccacaaatgcgcctgggttagcgtgcgcaggcggtaatcaataccggcgtcgacattcatcacatcgcaatgctgtttaatggcgtcgatggcgggcaggaaacgagcgcgctgaaggccgttgcggtacagctcgtcaggcggaatattcgacgtcgccaccagggttatgccgcgggcaaatagcgctttcatcaggccgcccagcagtattgcatcggtaatatcagaaacgaaaaactcatcgaagcagagcacatcggtttcagctttaaagcgatccgcgacgatttccagcggatcgctgtgcccctgcagcgtcgttagctcttcatgaacccgcagcataaagcgatgaaagtgcagacgttgtttacgttctcccggcaaactttgatagaacagatccatcaaccaggtttttcctctgccgacgccgccccacatatagaggccgcgaacggcagccgcttcggcaacgggttcgcgcttgcccagcagtttgccgaatttggcccgcagaccgccgccggtttgcggcgcgaccgaaggtttattctgcagttcttgataaatcgtatcgaggcggctgaccgcttctcgctggacgtcgtcaggttgatggctcccctccttgagagaggaaaggtaacgcgatgttggggacaggctttgcatgatctaattgttattccttgaaaaccgtaatgccgtagctcacgattgacgaaaaaaaggccgctctacactacgtgatgatacgccaggattccacttctgtggaattagcggttatagtggcactatcgggcgcaggcggagagcctcacagccaccctacggaaccacaaaacaacgggagatgttcatgacctgggaatacgcgctaattgggctagttgtcggcatcattatcggcgccgtcgcgatgcgttttggcaatcgcaaattacgccaacagcaggcgctgcagttcgaactggaaaagaataaagcagagctggaagagtaccgcgaagagctggtgagccattttgcccggagcgcagagctgctggataacatggcgcatgattaccgccagctgtatcagcatatggcgaaaagctccaacaacctgctgccggacagcatggcggacgccaacccgttccgcaatcgtctggaagaatccgaagcgggcaacgatcaggccccggtccagatgcctcgcgactactctgaaggcgcatccggtctgctgcgcggcggcgtaaagcgcgactaaaccggcaacgacagtaaaaatattttccgggcgcaccctctgcgcccgtttccaccttccatcccagctacaatttaacgattgcccacgttgttaccgggtcgaaaattcaataacatcgggccattcgggacgtttcccatacaccataggttacgagagccagcaactaatgaataaaccgactttgctgttgagtgcgttagcgttaagcattgggttgtcgttgtccgccttacctccggcagcagcgtctttaccgacacaggttcccggtcagggcgcgttgccaagcctcgcgccgatgctggagaaagtgttgccggcggtggtgagcgtacaggttgagggtaccgcgtcacccgcgcaaaatatgccggaagagctgaagaagtactttggcgacaacgcgccgcaagagcaggcgcagccttttgaaggcctgggctcaggggtcattattgacgccgcaaaaggctacgtgctgaccaataatcacgtcattaatcaggcccagaaaatcagcgtccagctcaacgacgggcgtgagttcgatgccaaactggtcggcagcgacgagcagagcgatatcgccctgctgcagttgcaaaaacccagcaacctgacgcaaatcgcgatcgccgactccgataaactgcgggtgggcgatttcgccgtcgccgtcggtaacccgtttggcctgggccagaccgccacttcagggattatttcagcccttggccgcagcggcctgaaccttgagggactggagaactttatccagactgatgcctcaatcaaccgaggcaactccggcggcgcgctgctgaacctcaacggcgagctgattggtatcaataccgctattctggccccgggcggcggcagcgtcggcattggcttcgcgatccccagcaatatggcgaaaatcctctcccagcagcttattcagtttggtgaaatcaaacgcggcctgctgggtattaaaggtatggaaatgagcgcggatatcgccaaagcgatgaaccttgacgtccagcgcggcgcgttcgtcagcgaggtcctgccaaactccggatcggccaaagcgggaattaaatctggcgacgttatcgttagcctcaacggtaaaccgctcaacagcttcgccgaactgcgttcacgcatcgccacgaccgagccgggcaccaaagtgaagctaggactcttgcgcgaaggaaaacccgttgaagtggaagtcactctggacaagagcacctcttcttccgccagcgccgagcttatcgcaccggccctgcagggcgcatcgttaagcgacggtcagatgaaagacggaaccaaaggcatcgtcattgataatgtcgataaaggcagcccggccgcgcaggcgggcctgcataaagacgatatcattattggcctcaaccgcgagcgcgtgcgctccattgccgaactgcgcaaagtgctcgaaagcaaaccgacggtgattgcgctgaacgtcattcgcggcagcgaaagcatctatctgctactgcgttaactcgccttccgggcatcgcgtgcagtgcgatgtccggacaagacgtgttatgctgcgcctgtctatccatcaacgatatctgcatcatgcctggaaagtttttacgttcgatacttatcggtttgattgtcggcggcctgctgctggccgttatgccttcgctgcgccagtggcagctttcgccgaccacgcagtacgatagcgcggatgaattccccgccagctataattccgccgttcgccgcgccgccccagcggtcgtgaacgtctataaccgcgcccttaacagcaccagccataaccagctaacgctcggttccggcgtgatcatggaccagcgcggctatatcctgaccaataagcacgttatcaacgatgccgaccagattattgttgccctgcaggatggccgggtctttgaagcgctgctggtcggatccgatactctcaccgatctggcggtattaaaaatcaacgccagcggcggtctgccggtcattccgattaatccgaaacgcgtgccgcatatcggtgatgtcgtgctggcgattggcaacccgtacaacctcgggcaaacaattacccagggtattatcagcgccaccggccgtatcggcctgaaccccaccgggcgccagaacttcctgcagaccgacgcgtcgatcaaccacggtaactcaggcggcgcgctggtgaactcgctgggcgagcttatgggtatcaacaccctgtcatttgataaaagcaacgacggcgaaacgccggagggcatcggctttgcgatccccttccagctggcaaccaagattatggataagctgatccgcgatggccgcgtaattcgcggctatatagggatcagcggccgcgaaattgcgccgatgcatgcgcagggcggcggcggtatcgatcagctgcaggggattgtggtgaatgatgttgcgccggaaggcccggccgcccaggcgggtatccgcgccaacgacgtgattatttccgttaacgacaagcccgccgtttccgccctcgaaaccatggatcaggtcgcagagattcgtccgggttcggaaattccggtggtgattatgcgcgacgataaaaaaatcacgctgcatatcgccgtacaggaatatccggcaaccaattaacaggctcccccgccgggggagcacctttcaatcagcaaatagcggcccggccgggaatgtcgccagaaacccggttatggccagcagcgaccgcaggtcaggccacgcaaactggcgctcccgcagctcgtcatccagcgtcatgagcgcaaactcgcctttatcccccagaacgccgccctgccagagcaaccgttgagcctgctgccgggcccagggggaatcgctcttccaggccagcaggtgcagcagcgcctgctgcagacagatgccagaaggatgcttatcccgcagcagccgccggtaaaccggcagcgatatgctgcgtacggtataaaaaccgctgcgggtttcggcatcagcatccgccacgctggcgcaatactgaccggccagatcgcatagacgattgtgcgtcagcggctggcccagggcgttcaggcgacccgctgcggcacacagcagcccacttctttgcatccacggcgtggagtcccgaaataccacatcaggtagcgccggttctgtttcagctgctttattttgcgtacccgcctcatagcaatggacaaaaaaatcatggcctccgcgggcaactgatggttgcgctaacaggttaagcgcgggctgcagttgttcaacttcatctactgatgccagcatgtaatcgataatgacatcttttgtcgatgccctgctttcggggcgtaatgttatggtttcattcatcaaagcctccttataggaaatctcccggtggcgctgcgctgaccgggctacgggtccgtgcagtctggtagcccggacaaggcgcgttaagcgccgcctccgggataatccccgggtcgcggctgacgccttacccgggctacaggtttacagccgtctgcgatccggtagcccggacaggcgcagcgcgccgcctccgggaaaggtaacgattcacatcgccagcacgtacttgagcatcaccccggcggcaatcgccgagccaatcacccccgccacgttcgggcccatcgcgtgcatcagcaggaagttctgcgcgtccgactccagacccactttgttcgacaccctggccgccatcggcaccgccgacaccccggccgagccaatcagcgggttgattttgttccggctgcacaggttcagcagtttcgccatcagcacccccgccgccgtccccacgcagaacgcaatcacccccagcaccagtatccccagcgtctgcggctgcaggaacttgtccgccaccagcttggcccccaccgacagcccgaggaaaatggtcacgatatttatcagcccgttctgcaccgtgtcgctcaggcgctccaccaccccgctctcgcgcatcaggttgccgaagcagaacatccccagcagcggcgccgcgtccggcagcagcagcgccaccagcagcagcagcaccgccggaaagaggattttttcccgcttactcaccgtgcgcagctgcaccatacggattttccgctccttctcgctggtcagcgccttcataatcggcggctggattaacggcaccagcgccatatacgagtacgccgccaccgcgatggccccgagtaattccggcgccagcttgcccgacagataaatcgccgtcggcccgtccgcgccgccgatgatgccgatggccgccgcctgcggcagggtgaagctgatgatgccgaagtagttcagcgtcagcgcccccagcaccgtggcgaagatgccgaactgcgccgccgcccccagcagcagggtgcgcgggttggccagcagcgggccgaagtcggtcatcgccccgacgcccataaaaatcaccagcggagcgatacccgagccgatggcgaccttatagaagatggccagcaccccggcggagtagcccatatccacggcgagctcctccatctgcccctgcaccgacggcagggccagcgccagcgcctccctgatggcgtggacatccggcgtacagtggagcttcgcggcaatcaccgccagctgcccggcgtcgtggtgggccagcaggctctccagggcggtcagggccagcccggcctccgggatattcgacagcaggccgccgaagccaatcggcagcagcaggagcggctcgaacttcctggcgatggccagccacagcagcagcaggctcaccagcagcatgacggcctggccggcgccgaggtgcatcagccccatgccctgaatcagggcgttcagactttccatttcgcgtcctcttccttacgccaggctcagcagggtgtcgcccaccgccaccgcgtccccggatttcaccgcgataccgcgcacggtcccggcctgcgcggcgcggatttcggtttccatcttcatggcttccagaatcagcagcacgtcgccctcggccaccgcctggccctcgccggcgatgaccttccagatggtgcccgccagcggcgcggtcaccgggggtgccggcgcctgccggggcggctgcgggggccgtggcctgaacgggggtcgctgccgtcagcgggctgatatcgccgccgtcgctgaccttcaccacaaaggccttaccttccacttccacggtgtagacgccggaggcggccggtttctctgctttcaccgccggtttgacctcttcagcctgcggcagcggctcgaacgccgccgggttgtggcggttctcaaggaacttcaggccgacctgcgggaacagggccacggtgagcacgtcgtcgatggcgttgtcggccagctgaatattcttctcctgcgcctggcgcttcacgtcggcttccagctgcgccagctccggcttcagcaggtccgccggacggcaggtgatggcctctgctccgtccagcacgcgcgcctgtaatgccgcgttcaccggcaccggagtgtggccgtactcgcccttcagtatcccggcggtctccttcgcgatggttctgtagcgttcgccggtcagcacgttaagcaccgcctgggtgccgacaatctgcgaggtcggagtgaccagcgggataaagccgaggtcctcacgcacgcgggggatttccgccagcacctcatccagacggtgggcggcgttctgctgcttcagctggccctcaaggttggtgagcatcccgcccggcacctgggccacgaggatacggctgtcggtgcccttcagctggccttcaaaggcgtgatatttcctgcgcacctcgcggaagtacgccgcaatgctctcaagcctgaggatatccagcccggtgtcatgttttgtgcctgccagcgtcgccaccagcgcctcggtggccgggtggccgtaggtggcgctcatggaagagatggcggtatcgacgccgtcgacgccggcctcgatggccttcagcagcgccatctccgccatcccggtggtggcatgagcatgcaggtgcagcctgacgtcatagcgttttttgatttcgctcaccagctcgaaggccgccatcggggtgagaatgccggacatgtccttaatcgcgatggaatcgacgccggtctccagcagctgttcggtcaggtcgagccaggtctgcagggtgtgggccggactggtggtgtaggagagcgtgccctgggcgtgggcgccgtggctgcgcaccgcctgcagggcggcctgcatattgcgcgggtcgttcatggcgtcgaagacgcggaacacgtccatgccgtttttgacggcgcgctcgacgaagcgctgcaccacgtcatcggcgtagtggcggtagccgagcaggttctggccgcggagcagcatctgcagcggggtcttcggcatggcctttttgagctcgcgcaggcggacccaggggtcctcgccgaggaagcggatgcaggcgtcaaaggtggcgccgccccagcattcaagggaccagtagcccgcgtcatcgagggcggccgcaacggggagcatatcgtcgaggcgcaggcgggtggcgaaaagggactggtgggcgtcgcgcaggacgacatcggtaatggcaacggtcatggattcctccgtgaattaagggttaagtcggcgatggtggtggatagcggcggcaatcaccggctttaagcgggcgaagtcgtcagcgggcgctacggcggcgggtgcggccttcggcgcgggagccggttccgggaagaagcggttgacggcggcggacatgccgcggatggcgaaaatcagcagaaacagaaacgccagcacgaaccccatgccgagaaacatcagggtgaagccttcacctaatagcagtgctgcatcagtcataaaatagccttcaggcaggaggcacgataatggtgctatttatgacgaagaaataacaagggtggatttccctgagccgcccccggccagaacccttggttattattatcgtcataacgcattaccaccattaccgtgcaatttacgtaatcaggtttatttgatgaaacttacgttctggcatatttcatcagcgacaatctctttacgctgattgaaaataactttgttctgttcaaacaggttattaccatgagtatcaatagaaacaattaacgggccaaactctttcacccgacatacccacagcgtttccggcatccccagatcgcgccactgcgcatcttcaatttcttccacgcacaccgcggctactaccgcgcagccggccgggaatacgcagtgcagcgctttatgctccgcgcagccctcttcagtgcccttccccataccgcctttaccaacaattaatttcacgccggtctttgcaataaattctttttcgaatttttccatgcgcatgctggtcgttggtccgacggagaccatttcaaacttatcgtcttcgcctttaatcggacggacaataggcccggcgtgtaaaatagcgccgccgctaacatcaacgggtaattcacggccaccttcaattaagcgacggtgcgccacatcacggcaggtaacaatatggccattgagataaataatatcgccagctttaatatcggctaaatcttcatctttaattggcgtagtaaggatttttttcgtcatcagaaattcactccgctgtgagacataatggtgtagttcaagtctttatcaaaaacgatatgccctttccggtgcgaccagcagcccacgttcaccgccaccccaatggtggaaggatgacgcgcggtgttttcaatattcacgcccataacggaggtattaccggacatcccctgcggcccaaggccaattttgttaataccgtcttccagcattttttccagcgaggccgcacgttcattttcattatgcgaaccgatcggacgcatcagcgcttttttcgacagcagcgccgccgtttcaacggaggtcgccacgcccacgccgaccagcagcggcggacacgcgttcaaaccgtagctggtcatcacgtcgagaacaaagcgggtaacaccttcataacccgcgcccggcatcagcaccatcgctttccccggcagggaacagccgccgccagccatataggtataaatgctgcactggtcagaattggggacaatctcccagaacaccgtcggcgtgcctttacccacgtttttgccggtattgtattcatcaaaagtctcaacgctgttgtggcgcagcggggaatccacggtcgctttaatcaccgcttcacgcagcagcgcttccagctcgccgatcagcgggaagttagccccgcactccaccagaaactgaatcacgccggtatcctggcaggaagggcgatccagctcctttgccagacgctggttctcaatcatggtcgtaaagataacgtcagccagtttactggtctctttcttatgcaaatcttccagttttgcagtgacgtcatcaggtaagactttgccggtataccccacaaatttggccatcacattggtcatatgggatatctgttcacttttgctcatacaggctccttagtcaggacagcttccgttcattacggatgaaaagggaaaaggattggcagcagaatcaggctgacaatggtggaaacgataatcagagggatgccggatttggcgtagtcgacaaacttatagccacctgccgacagcaccatcatgttggcaggcataccgattggcgtagcgtaggcgcaagaactgccaataaccgtcgccattagcaccgcacgaggatcggcgcccatgcccgcggcaatcgacaggctcaccggtactaacagcgcgacggtcgcggtgttggacatgaagttagtcataatgatggacagcgcaaagaccaccaccagcagcataaacggcgaagagttttgccccagcatgccaatcacgtgatccgccaccagttttcccgccccggtcatttccagcgctttcgccagcgccagcgtgccgccgaagataaaaatggtctgagaatctatggctttataggcctgcttttctgtaagtacgccggtaaccaccagcaccagcgcgccgatacagcccgctaccgccagactcacaccggtctgcttttcgaaaatcatgccgaggatcgtggcgatcagaacaaccaaagagaggatttgcttccagcgcggaacgtggctgtaatcgcgctgttcaccgatgctgccaactgcaccgctgttcgggtgattgggcaggaatttatagccgatggtcaggaagtaaataacgccgcaaatcagcatcggtaaaccgactttggcatattcaaaaaagccaaaaccgctgccaatattctgcaaagctgactgcgcaatcaggttgcccggcgcgccaatcaacgacaggttaccgccgagcgcggcggcaaaaaccagcggcatcagcaaccgggaacgggcaaagcctgatttcgccgccacgccgataacgaccgggatcagtacggctgcggtaccggtattggagagaaaaccggacatcacgccaaccacaaccataatggtaaaaatcagctgtttttccgttttcgcgaagcgcgtaatcacgccccccaccttattcgccattccggtttcaaatagcgccccgccgacgataaacatggcgacgaagagaataacgttggtgtcgataaagccggcgaaagcctgcttgagattgagcacgccggtgagcaccagcacgacgcaaaccaccatagacgtgaccgcaagggggattttttcccacacgaacatggcgatagcaaacaccagcaaacatagggtaatggtaatcggttccatatttatagttatcccatcaatgatatatgatattgtatccaatattgacgaggggaaattattcccatacaaagagtaagtcaacgcgtttttttcgaaagcttcaggattgagatctttatcaaaatctcgcgaaagcagtcacttatcgaaacttatttatgaaatgaataagtaagacgcctgcagcgatcctacaggcgatgcgatcaagcggagggttcttcgacgtagcgcgttagcatgttctccatcgaacggatgatatgctcgcgcattcgctggcgcgccagcgcttcattatgctgctccagggcctgtaaaatccccttgtgctcgcggatggaaatgatcgcgtactcttcctcagtgaccttatgccccatcgaaagcccgttccacatattgctgagcagcagcttcattttgccatttcccgccgcgttccatatctccatatgaaacgcctggttcaggtctgaatattcagctgagttattttccgccagcgctttttccgcagagtaatgcacttcggcaatgcgcgaaatgtccgtcccgggacggcacgctttagcgactgcttcactctccagcagcgcgcgaatctcataatgctcgcggatcgtttgttcgttaattcccagcacgaccgcccctttattgggccggactttaatcagcccatccgcagccagtatctgaaatgcttcacgcacgggcatactggacacgccgaccatggtggcgatcccttcaagggtaatttcttgcccttcaactaaatctcgcgacagtatagctttacgtaatactgccgcgacctgctctttcgctgaaagaagcttaattttccctaatcgaggcttctgcactttcccaatccttcatgtgttgacgcattatttctgccagagagaggaaataacgctgcgtttcctgcgcgatctcggcgcgatcgccctgacgaatagcctccatcagagagctgagtatttgcgccgactcctgattatcctctttcagatacagaatgacataaccgatataaccatccaaaaactgctgataaattttttccagatagcgattatcaatataagaaatgagcgtctcgtggaacgccagctctcgcgctcgctcaccgggatgccccagcgcgcgcgcgctggccgccagcgattcgcacgccgctgcgggtaccaatgaaaaaagctccgttgccatcaccgcaatggcccggaaaatatgactgacgtggtcaggcgccagcctggcgacctgcatatggcggtttggcaaacgcaccagaaacccttcctgctcaagggcctgtagcgcttcccgaaccggcatacgagaaagccccagctgttccgcaatactctcctgcgcgagttcatcccccggtttcatgctaccggaaaggatctcgtaacggagcatttgcgtaatgtggtccctggtctgctttctttcgatttttttcacaacgtcctcgtttattaccgctcaagacgcggggagtttagcagatttaccagcaggttgagtcattcaggggtgggagaaagccataaaaaagccggaacccaggctccggcttttcttttcatgaaacgttatttattcacaaagtcttcgccaagggcgatatctttcttcagcgtatccagcatcccctccagcgcctgctgctcaaacgcgctcagcgtgccgatagactgacgctgctctacgccatttttgcctaacagcagcggctgtgagaagaaacgggcatattgaccatcaccttcaacgtaggcgcattccactacccctttctctccctgcatggcgcgaactaaggagagaccgaatcgcgcggcggcctgtcccatcgagagcgttgctgagccgccaccggcttttgcttccacaacttcagtaccggcattttgaatgcgcttagtcaaatcggccacttcctgctcgctgaagctgacgcccggaatttgtgacaataaaggaaggatagtcacgcctgagtggccgccaatcaccggaacctcaacctctgatgaagatttgcctttcagttcggcaacaaaggtattcgagcggataatatccagcgttgtaacgccaaagagcttgttcttatcgtaaacaccggcttttttcagcacttctgcggcaatcgccacggtggtgttcaccgggttggtaatcaccccgacgcaggcctgcggacaggttttggcgatttgctgtaccagatttttcacaataccggcattaacattgaataaatcggagcgatccatgccgggcttacgcgctacgcccgcggatatcagcaccacatcagcgccttccagcgcaggggtggcgtcttcgccggaaaaacctttgatttttacatcggtagggatatggcttagatcaaccgccacgcccggggttaccggagcaatgtcgtacaacgagagttctgaacctgaaggcagttgggtcttaagtagtagggcaagcgcctggccaattccaccagcggcgccgaggactgcaactttcatcctaaactccttattatggttaaaatagtctttcgttactccgtcgcctggaccttaattcacaagatgaacaattacaataattatggctgaagaatgcgtggtcgtgcgcagcgatgcagcagcttcgcattttcctccctgagactgaccatccagcaaagcgtagtaccggatcgactgttggttacaatacacccagcgtattgagcagaacaacatcatttaataacatttcatttacttttgtggcaatttgcgcgccgtgacgaaagcatgttccttattagtgttttttgctaaaatatgcgcccttcataacattatttacgcttctcccctgcggattatttgcataaaaatgcatgcttatgcataatgatgttgtttttaccaccataattgggtgacttatgcgtagttcggcaaaacaagaagaactggttaaagcgtttaaagcgctgcttaaagaagagaaattcagctctcaaggtgaaatcgttcaggccctgcaagaggaaggcttcgataatatcaaccaatcgaaagtctcacgtatgctcaccaagtttggcgccgtacgcacgcgtaacgccaaaatggaaatggtttactgcctgcccgccgagcttggcgtcccgacgacctccagcccgctaaaaaacctggtgctggatatcgattataacgattcggtcgtggttattcataccagcccaggcgcagcgcagctgatcgcccggcttctggactcccttggcaaagccgaagggattctcggcagcattgcgggtgatgacactatctttaccaccccggccagaggttttaccgttaaagagctgcatgacgccattctcgtcctgtttgagcaggaactctgatgcccttccctctggttagcgccagagggtatcccttcaaaaaattatcatttctttaacattttgtgtgtttttccgcttctatacattcatttacgtgatgaaaccggcttaagcgcacaaaagatcaaattcacctatcattatgattttattagcaataatgaccacacgtggcgaagaaaagacatttctaattcttatatgttataaaaaagacatttctttgtaattatttacatgaaaaacaattagcaaggtattaattttttctgtgattagtgtatacttgattttgtgatgagggtcacgaaacaaaggccccaacaaaaagattcgacgaggtgaacatcatgaaaatcaaaaccactgtagcagcattaagcatcctttccgttctgtcttttggcgccttcgccgctgactctatcaacagcgaacaggctcaaggccgtcaggcaatcggcaccgtttccgtcggcgcggtaagttcttccccgatggatatgcacgaaatgctgaacaaaaaagcacaagaagaaggtgcttcttcctaccgcattattgaagcacgtaccggtgaccactggcacgcaacggctgaactttataaataagatttaacgattgtcggtcattaactgaaacagaatctctccagcggccccaggttcattaagcctcccgccgctgcaaatatgaaggttggagaaaaaattatgaaaagcgcaattatcatcgcatccctgggtctggcttccgttctctctttcggcgcaaacgccgccgttaatcaagtgaacgccgaacaggcgcaaaatctgcagtccatgggcaccgtttccgtttctcaggtaggcagcgcgccgatggatatgcgtcaggaactggcggctaaagctgagaaagaaggcgccagcagctaccgtattattgaagcccgtaccggcgataactggcacgctacggctgagctgtacaaataaaccctcgtcgtcttatccgacgacttgcccccgctccgtcgggggcttttttatgactgccgcacattaaaacgcagctccccttccagctcctcttccgcctcatcaaagagcagaattaacgcgccgaaacgccgccgctgattatcgcttaaatgaataaactcaatctccagcggtaagggtaacagcccggcggtcacggcctcccacagagaatccaggttattcactttctcacgcgctaaagcaaaggtacgagaaaactcacgataaaaatcctgctgctcagctatttcatcaaaatcaaaggtataggtagtcattgcccgcatcccgtccacacctgcaacttttcatagcccggtcatcccggcgtgtagttccactctgacggcggaattcatactctgagcgttaagtatagcgataaaaaaaccgacgcttcggcgtcggttctggcggttagctgttggttaacacatgctggtacttatgcagcatctccaccagcctgcgtaccggctcggtcacctgcggagaggcttcccaatgctgtaatttttgctggtagatatccagttcatcaagcaagcgggcaaaatagtagcggcgcttatcatcactactggctgaaatgacgcgatccgcggtacgtcgcagctgccggtgaaaggccgacagatcgtcatttatcggtaccggcgcatcgcgcagacgctgatgcgcgataatcagggtcagcgccagacgaaagcgggcgatatcgccagggaatttattcagcaacaaaaagagctgacgatacagggccggcaagtggttctctttacgtcgcgccatattggtggtcagcgatgataccgccgccgagacaaactggttgagcagcacgcggccggtacgggcctgcgaattatcacgaaccagcaggatcaccatcagcgcaaggaagcatccgacgatctggcccagggcactatcaagaaactggttgaattcaaacttcatcggattgtcgagcaccagaatattaatggtgctggccagcgcccccagcgagcccagccgccgcttttgtacctcgatgccgataaaaaaggccatcaccgccaggctgatacacagcagcagcatactttgctgcgtcgcgggcataatcacgaggaaaaacagcgcccccagcggtaacgccgccaacgtgccgtagaggaaatctatagctaccatccgcggattaggtaaacgcatcgctaaggccgtgacaaccgcaatcatgaccatcgccccgcttcctgaagtccagccggtccacagccagaacagcgtaccgaggatacaggagatagacgtacgccaaaagttgaccatcgcatggtgccgctcggcggattccgccttcaccaccacttcgccttgcagcacttcttcttcaatacggctgattttggtattgccgaccacgccccgcttcaaaagcagatagcgcgtcgcagcgcctacccagctgtagattgttaccggcgtattgtgctctcccttccaggtcaagaagcggcgcatccgctttagctggcggtgcacgtcctgcacggtctcgaccggttcagcaaacagctcgcggtaatcatccgtcaccatctcaggccgggtattctgaatcaaataggtttcacaggcctgagtaattaaggtcagagagagggtattgatcgccttcagccgctgattcacttttgcccagcgcgaggactccatgatcaagttgccgcgcatcccttccagcccgttggtacgacgcaccagcgcgctccaggccttatcgacgtcatctttatcaccatgcgccacgcaaagctgcatcaggcgatagtgatcgatcagcagattatccagttcaaggtcgatctcttttttaatcgaacgcggagaaaacagcaggtcggccacaatggcgctgacgataccgatgacaatctcactgcatcgctcaacggcgaactgcggcgccagcatcggctcttcatgaatagtgataataatgataagcgcggtatagcccgccaggccccaggcataggagttctcaacccgcaccagcgaggagatccaggtgcagaatccggcccacaggcagcataccagcaccatcagcagcggggcgcggatcatcaggatgatgatcgccagcgcggcgatacagccgataaaggtgccggcgatacgcagcatcccgcgatagcggatcgccccggagtaaggctccccgcctgcggcaaacgccgggccggcagcaacgatggcggcggtaagcaccgcccagcgcggcgtttccagctgaaaatgaaaaccgacgaataacgccagcaccaccgcgcaggctaacttaacggcgaagcggagatgccggagttcgatggtgaagatccccatggcgattaaccgaactcacgcaggcgcatcgccagtttctggaagaagtttgcctggcgagtatcgcgatcctctttaccggtaatcaccaccgtcgcggtggtacccgctggccagagattgccctgctgttgatcgaggcgaatacgtaccggcacccgctgtgccagacgtacccattcaaggttagaatcaatagaggccagcccttttgaatcgctgctgctgctggcattggtgacgcctgcagcaatgctgtcgacggtgcccctgagggtgtgtacgcttcccagcggggtaatttcagcacgaaaaccggggcgcacgccctcaagcttggtctcttcaagataggccataacatagaaggtattctgcttcaccagcgcaaccgcggtggagcctcgggtgataaactcgccgcggtaaacgttcaggttggtcacccagccgtcggccggggcgcgaatcaccgtacgttcaaggtcaagcttcgccaggtcgcgacttgccgtcgctttggctaattgatgctcaacggtttgcagaacgttattcgcctggtctatctcttcccgggacatggcctggacgccaaggcggttacgacggccggcttcgacgcgtttctcctgcgccagagtctgatagtaggagacatcggcttcagcctcggctaacgccttctggtaacgcggctggtcaatgacgaacaaaacctggtctttcttaaccagttggttatccttgatattcacctgcgaaatcaggccggagacatcgggagcgatggccacaatatccgcactaaaacgcgcatcgcgcgtccagggcgaggcggtgtaatacacccatgcgcgaaaaatcgccataaatgcaaggataaccagtatcacagtgattgcggtacggaggatatttcttgttagtgttttcacatcaacctcaaacgaacaaacgtgatatcagataaaacaggcagcaatatagcgcggtattaaacagtgccgggtgccagacaaaatcatagatgcccgttggaaccagcaggcggtgcaccagccagaagatggctagcgacaatagcaattcaaagaagatcggcggaaacgacaagccgaaaatcacaatgacaggaaacagactcatgatgaccttgataagaagcgtacaggtgatatgcgcgatgcgtttattattaagctaactatatagtaacgtaacaattgcggtcttatctataatgtgtgatctaaatcacttttaagccagagtgaataatggaacgattaaaacgcatgtccgtttttgccagagtggtcgaattaggttcattcaccgccgcggcccgccagctccagatgagcgtttcttccatcagccagacggtagccaaactggaagatgaactgcaggttaagctgctcaaccgcagtacgcgcagccttggcttaacagaagcgggaaaaatatattatcaaggctgtcggcgaatgctgttcgaagtccaggatgtccatgaacagctgtacgcgtttaacaatacgcccatcggtacgctgcgcatcggctgttcttcaactatggcacagaatgtcctggctcgcataaccgccgatatgctcaaagagcacccgggtctctcaatcaatctggtcacaggcattcccgcgccggacctgattgcggacggcctggatgtggttattcgcgtgggagcgctgcaggattccagcctcttttcccgccgcctgggctccatgccgatggtgctctgcgcggcaaaaagctaccttcagcacgccggatgtccggaaaaaccggcggatctcgccagccactcgtggctggaatacagcgtccggccggataacgaatttgaaatcatcgctccggaagggatttcaaccaagctgatccctcagggcagattcgtcaccaacgatccgatgacgctggtgcgctggctgacggcaggcgtcggcgtggcttacgttccgctgatgtgggcgatcgaagagatcaaccgcggcgaactggagatcctgctgccgagctaccagtccgatccgcgaccggtatacgcgctgtataccgagaaagataagctaccgctgaaggtacaggtatgcattaattacctgactgagtatttcgtcggggtggcgaagatttaccaggggatgcacggccgggggattgcccgctagcggcccgagcccgccacagagggtaagaacagattatcgggcccggcatcggaaataatctgcgttacgtcgcggagattgccgatacgcacctccccggaacgatcaaatttgcttttgtcgattaataatagcgactgcgccgcacgtttcagaagcagcgatttgtaggcggcattattggcgctcgaatcccagagtacgccatcgttatcgatcccctcgcaggaaaaaataaacagatcgatctccagcgatttgacctgagaaaacagcgccggattaacataatagccatactgacgcaggagctgccccccggcgctgatcagctggatccgctcacggcggcccagctctacgcagaccggatggctattggtaaacaccgtcagggtcatattcggtagctgacgcgccagaaaccagcaggttgagctggcatccagggcgatcgtcatcccttcatcaatccacgccagcgccgtacgcgcgatatcagatttatgggcataatggcttttcacgcggcgctgaaaaggcttctcgccgttgtgattgttacgctggagaacgcgcgcctgcccgtggctacgctgaatacgcccctgcttctgcagctcgctcaaatcgcgacgaatggtctcgatactgacctgcagcagatgggacaacgcttcggtggttaaggtgtgatgctggttgagtagttcgactatctgctgctgacgcgcggctttcatcgcgactccgcggaggtgatttgcgctttcgccgcgggcgaaagcgcattgagaagtatcaggcagtaccgccgacggtgagtttatccactttgagcgtaggctgaccgacgccaaccggtacgctctggccctctttgccgcaaacaccgacgccgctgtccagcttcagatcgttccccaccatcgaaatctgctgcatcgcttcgatacctgaaccgataagcgtcgcgcccttcaccgctttggtcactttacctttttcaatcaggtaggcttcagacgtggagaagacaaatttcccggaggtgatatccacctgaccgccgccgaagttcggcgcgtagatgccgtaatcgaccgattcgataatctcctgcggcgtagatttccccgccagcatgtaggtgttggtcatacgcggcataggcaggtgcgcgtaggattcgcgacgaccgttaccggttggcgccacgcccatcagcctggcgttgagcttgtcctgcatatagcctttgagaatgccgttttcgatcaaaacgttatactggcccggcgtgccttcatcatcaatggcaagggagccgcgacggtgagcaatggtgccatcatccactacggtgcacagctcagaggccaccagttcgcccatatggccgctgaataccgacgtcccgcgacggttaaagtcaccttccaggccgtgaccgacggcttcatgcagcaggacgccaggccagcccgcgcccagcacaaccggcagcatcccggcaggcgccgcgacggcggtcaggttgaccagcgccatacgcacggcttctctcgcccaaacatccgcgcgaacgtcgccatcctgcgagtccaggaaatagtcgtagccaaagcggccgccgccgccgctggcgccgcgctcgcgtttaccatcctcttccaccagcacgctgacggaaaggcgaaccagcgggcgaacgtccgccgccagcgtgccgtcggtggcggcgacaagaattaactcgtagacgccggtcaggctggcggaaacttcctgcacccgcttatcggccgcgcgggcggttttatccacccggcgcagaatatccagcttctcttcccggctcatactttgcagcggatcgatgctggtatagagggaacgatgttccaccccgccaagggtatgcactttaccatccccatggtcgcgtacaatggtgcgggccgcctgtgcgctctgttccagcgccagtcgactaatctggtcagcataggcaaagccggttttttccccgctcaccgcgcggacgccaacgccctggtcgatattgtacgaaccatctttaatgatgctgtcttcaagaacccaggactcgtgatagctcgactgaaaatagagatcgccgtaatccagacggcgctcggccagctggccaagaatggtaaacagatcctgatgattcaggccgtttgccgacagtaattgttcacttaccaggttcagactcatcgttttgctactcgtttgttgccgcctcaggggcggaaataaaaaaggctatctattgagagtgcggtaattacgcacaatcgtcaaatcattgctttttgtcgctccgcgcctggcgcagcacttcgttaatttgcggctgatcgataggaccggtgatgcgatagcgcaaaatagagaccttgttccacagcggccccagtaccttactggcagcaaagaccgcggcgccgataatcgggttaacggcaaaggccgcggcgacgcccacggtcgcagaaatctccggcgcgaccacggcctgcatatccagctgacgacgcacgagatccaccgaccccttcatggcgatatccgcttccagaccatcgaccagcgtatcgtcggtatgcagaacgccgtctttaatccacgccgtactgcgaatggaatcaaagtagaacccttcgctgaacgtatcgctaaagtcgaagcgcagcttgcgcaggagcgcgtcaacgctcaacaaacgcagaagctggccggcatgaccggtgctgaggtcggtaaattcgccttttccaagacggcttttgaggatcccattaagcgaggcaacgtcgggctgccacggcggcgcacgccagtgcaggtcataatcgatatcaaacgacgaaccttttaccggcgtggagacgccgaagaagttcacgaaatcgtcagttttattaccgtgcagcttacctttcaaagaggttcgtacgcccgccggcgcgctcacccatacgccatcggtcgtcagacggccaaaaccggtatcgaccagtccgttcgccagcgtcagggtatcgccgcgaatatcaaaatccccttcgatacggccatatttttgcccccacagccagcactcggcgcagcgaagctgaaggtccggccagccgtggaaatcaatgttggtatcggccagcggggcgctgcttttttctgtcccgcggcttttcgccgccgttgggttgtagtagagatagcgaatggccgccagccacggggcgttcttccgcatcgtcagggttgcgttgacttcacgcccctgggcttcaatcttcgttcccccggcatcgggccgggagacaaggctaacgttattccagctctggcccgccatcgttaacgccggcgttcgcagcgtgacctgctccgggaagacgagattactgctgacgtcattcgccgctccgccctggaacagcgccagccactgcgcgccatccatcggcggcatattcagctccacgcctggctgctcgggaagcggagaaacggctttactgtccgtggttaaaatagcgcggtccagggtcagcttatgacccagcagccagcggctattaatatggttcttcgcccccattgagccggccagattaaaactgcttaagccgccatcgaccttaatttttaccggcaacggctccccggcctgcttatctaacggcgcaggtaagtgactacttacactcttcaggtcagcgttgaggtcaaccttataggccgcgctaccgcgatacggaagctcaatcgcgacttttccgtcccagggcacgctgccgctcagggtgccgtccagggatttcggcaataaaccggtacgcgcaggctgccagctggcgttcatcccgacgttcacgagaaatgctttcgcgccttcggtggtcgagaaatcaagattcagcggctgattaaaccagctcgcgctcatcggttcgcttttcaggtcgccgtttacaaagctgaatttaccgctcaggttgtgcaatgtggtatcgataggcttgataaacaagctgttattgttcaaccggacatcacctttagcggtggtcatctcgccatccagggggatatcaagatgtaagcgagcgctaacattaccgtccagctggagctcatccagcgccgcgcccagggtctctttcagcggcgtctcgttaaaataagggccaacctctttacccgggccgttaacgtcggcatcaatcagcagcttttctcgcgaatagtcgggaatcaccgcatcgagattgctggcggtcacgttgccgagcatcgccttatcggccttcatccatagcccatcattgataaagttaaggtcgatattaagcccggtaagcgcgggccagtcaggctgaaaggcaaaggtggcgttcttgagcggcaccgtgacctggaattgcccctcattatgcttgtacgggaaaagatgcgggttaccgccataagccagcgtcgcatcggtggcctgaccgcctttaatggctccgctgaggtaatccaccagcgctttgcccatcagattttccgggaagtagcgccaggcctgtccgccatcgttggtactgataccggccagaataccgagccagggttcgtcgccctgcggctgcagatagcggaacccaccgcgagcgcgaacgccggtagcctgtacgtcaatatcgcgaccatcgagcataaaacccttgtcattcttcacccaactgagggtcgcatcgcctttggcgatctccagcggcgcgcgaaagaccgtttcgtagggcattttcgcctgcgtcatgctggcatgcagagtaccgttttctacgctcccggcaatgttgccggagaaatgctcagcccctggcagcagcttccactgcttccaggacatgtcgctccagtccgcccggaagcgcgttttttccgccatttgcagcggaatatccagcgccagaagattgattttgccgtccggctgcgtcgtacgccagatttcgcccagcgacggagccagtttatccgccatcggctgcaacccggtcagaccgctaaggttaaggttgctggcgcgaatgcgcagctcatcgctgcgttgaccattttttccgtccacatcctgagccgggatccacgccatcgacagcgcgccgcgcggccagggtttgtcatccatcgagatgcgcgtatcagggatgtgaaagccccaactttgattatcgcgatagatgtgcgccgtcagattatcaaccgacagatggtgcttctctttatcgccctgccagctggcgccgccttttttcaaccatacatcgccgctggcgacatcgcccttgtcgatagtcatccagccttccaggctaaaccgcgcgctctgcagggcgatgttgtcctgcatccagcgcccaagccacggcttaacgtcgatatcatccgcctgaagccagacgcgccccttattgagcaggccgtcttcatcgcgcaggtccattcgcacctgcatcacgccgtgctggccggtcaggctgctgaggctaagctgcccctccgcgcgatggcgatttttaccgttcagccaggtaagctgcggaatggcgagctccgcacgctggccggagatggtcagaaagctcagatggctatcgcgaagaataaagtgatcgaactggcggaggaaaagatcgctgatacggtcggttttcagcccttcaccgctattattcgtttgaatgggggtattggtatgaacctgcagctgccagaaggtcagatcgcgaaactgccagcgcatatgcagcaggctttgccagacgtcgagcgccagggtgacgcgtttagcggaaagctcgccgccatcattcaggccggccttaacatcgcggacatcaagcgtcgggccaaaagtctgccagctggcgacaatatttgaagcatcgaccggtacgccggccatcgcggagactttttccagcacctgcggacgccagctgtttaactgcggcagaacgagacgcagaccgctcaccagcagtgcgacgacaacaatcaatgttgccacggtgagcagtaatatcccgggcagtcgcctcacgcatctctccttgtcagcctgttacgcgtcatccttttgcccgcctctttatcccgacatcagcaagcaaaacggatgattacatcattactacatcaaactgctcttgattatagagcggttcaatttgcactttgacctgcttaccgacaaagatctcgacttctgccagcgcgtgcgactcttcccctttcagcgtttccgctaccgcaggagaagcatagaccaggaaccggtcggaatcgtaggcatgatgcacgcgcacgatctcgcgcatgatttcatagcacaccgtttccaccgttttcaccgtaccgcgaccgtggcaggtagggcactcattacacagcacatgctccacgctttcgcgagtacgcttgcgggtcatctctaccagcccaagctgggagaagccgttgatgctggttttaacccggtctttgctcagcgcctgctcaagagagtgcagcacccgacggcggtgatcttcattattcatatcaatgaaatcgatgatgataatcccaccgagattgcgcagccgcagctggcgggcaatcgcctgggtcgcctcaatattggtattaaagatagtatcgtcaagattacggtgaccgacgaatgccccggtgttgatatcaacggtggtcatcgcttccgtttggtcaatgatcagataaccacctgatttcagctcaactttgcgttccagagcgcgctggatttcattttccacgtcaaagagatcgaaaatcggctgacggccgctgtagtgctccagcttgctggtcatctccggaatatattcggcggtaaactccagcagcgattcgtaagtcagacgagagtcaacgcgaatccggtcaagatgcgcatcggcgaaatcacgcagcacgcgctgcgccagcgccagttcgccgtacatttgatatcgggtctgctggcgctttttgcgttccatcactttcgtccagacgcgcttgagataggcggcatcagcagccatctcctgctcatgaacgccttccgccgcggtacggataatgaatccgccctgctcgtcacagtattcagagaccacttttttcaggcgttcacgttccgcttcgctttcaatacgctgagagacgccgacgtgcgaagcgccgggcataaaaaccagatagcgagagggaatagtgatatcggtggtcaggcgggcgcctttggtaccgagggggtctttcaccacctgcaccattaaatcctgcccctggcgcaccagctcggagatatcgcgtacggcgaactgtttttgctcttcgcccgccacgcactcggtgtgcggcataatatcggaagcgtgcagaaacgcggccttatccaggccaatatctacaaaagccgcctgcattcccggcagcacccgactgacacgacccttgtagatattgcctactattccgcgtcgcgcttcacgctcaatatgaatttcctgaagaataccgccatcaatgtaagcgacgcgcgtttctgatggcgttacgttaactaataattcagcagtcatctttatcccttttcttcacgcagtgagttaaagttacttagcaactcatacgtttccaccagcggtaagccaacgacggcgtgatagctgccatttatcttcctgacgaaacagccacccaacccctgaataccgtatgcacctgctttatctaaaggttcgccgctggcgacataatcggcgatatcctgccctgagagcacgcggaaagtgacctccgtgaccaccaggcaatccagcgtctgccgcttatcagccagcgccacggcggtcatcacctgatgagtctttccggaaagcatgcgtagcatctcggcggcgtgcccgccatcgcgcggtttttccagcacttcaccgttaaggatgacaatggtatccgcgcctaaaaccgggagatcgcgcggtgccagcgcgacgccagcctgggccttttcgcgcgccagccggaccacatactgctgggcgctctcctgcgggcggcgctgttcctcaataccgggaaccacgcgctcaaaagcgaggccaagctgtgtcagcagttcctgccgacgcggagaacctgaagcaagatacagaatcgtcatatcaaccttattgcaccgcaaactgctggcgcactttacgcatcagcaggaaaatccatggccagagcacaccgtttactacactactccagaacacttccggacggaaagagacgttgatcactaaaaactctgcccagaaaacaatgatatccacggagagggataacatgactaccaccagcgcctgttgccaaagcgccaggttacggaacagttgatactttagcgcaaccagataagccacaatacttaatgatagtgcgcgaacgccaagcgtcgacccgctgatgagatcgaggatcgcgcccatcacaaagcctgtgccaacgttaacccggtggggtagcgcgaggatccagtacaacaggataagcaatacccagtttggccggtagacgctaatgtccgccggccagggcataatctgcagcaatagtgcgataagaaacgagagccagataacccagcgtccctggctacggtaacttgccactattgccctcctgctggcagaggctgctgtggcataccggttgccggcgcgggcatctgcggccccatcgcatccggcgcaggcagaacctgcggcatcatctgcatcaggcgttcattcgctacgcgatgaacctcttccggcgtcatcggattcgcgccgttgcgatcggctccccacagcagcagcagataacgcaagcgctgcagaccggcagtcggacgcgcctgaatcaccgtatacgcacgctgcgtatccagcttaacggacgaaaccaccccgaccggatacccttcagggaagcggccgccgagacccgaagtgaccagcacgtcgccgacgcgaatatcggtattggccggcagatgttccagctgtaaatcgtcagtacaaccgttgcctgcggcaatgacgcgaatatcgttacgcagtacctgaatcggtaacgcatgcgtggcatcgcaaatcagcagcacgcggctggtcagcttcgcgaccgcgaccacctgacctacaacgcctttatcgctgataaccggctggccttcataaacgccgttaacgctgcctttatcgataaccacctgatcgctataggggtcgttaaccgttgagatgacctgggtcaccattttttgctcgtcctggcgcagcggagagcccagcagctcgcgcagacgcgcgttctcctgtttgtactgacccagcatcagtaagtcgctgttcttgagcagcaactcctgacgcagcgcgcgattttccagttcgagctgatcgcgggtggccagcgtttgcgaaacgctatccagcagttcccggggaccattagagacaaagtagaaagggctgacggctgtatccatgtacgttctaatttggctgaacgtacccaggcggctgtcggcgattatcacgccaagcgccaccaaaaccgccagaataaggcgaatctgtagcgacgggccacggctaaaaattggcttcataggctatgcgtattctcgtgtcagttaagatcggggcagccgtaggccagctacccggatctcaggctgactactcttcgctgaacaagtcgccgccgtgcatatcgatcatttccagtgccttaccgccgccacgagcgacgcaggtcagtggatcttctgcaactacgacagggattcctgtctcttccattaacagacggtcaaggttgcgtagcagagcaccgccgccggtcagaaccatcccgcgttcggagatatcggaagccagctccggtgggcactgttccagcgcgaccatcaccgcgctgacgataccggtcaacggttcctgcagcgcttcgaggatttcgttggagttcagagtaaagccgcgcggaacgccttcagcaaggttacgcccgcgaacttcgatttcgcggacttcatcacccggataagcggagccgatttcgtgcttaatgcgttctgcggtcgcttcgccgatcagggagccatagttacgacggacataattaatgacggcttcgtcaaaacggtcgccgccgatacggacagaagaggagtaaaccacgccgttaagggagatgaccgccacttcagtagtaccgccgccgatgtccacaaccattgaaccggttgcttcggagaccggcaggcctgcgccgatcgcagccgccatcggctcttcaatcaggaagacttcacgggcgccagcgccctgtgcggactcacgaatcgcgcgacgttcaacctgggtcgcaccaaccggcacgcagaccagcacgcgcgggctcggacgcataaagctattgctgtgcacctgtttaataaagtgctggagcattttttcggtaacgaagaagtcggcgataacgccgtctttcattgggcgaatagctgcaatgttgcccggtgtacgcccaagcatctgcttcgcttcatgacccacagcggcgacgcttttcggcgatccggcacgatcctgacgaatggccacaacggaaggctcattcaatacgatgccttgtccttttacataaatcagggtattcgcggtacccaggtcaatggacaggtcattggaaaacatgccacgaaatttttttaacatactaagggataatcctgaaagctggggcggaaaacaaaatccgcttactttaccaaccacgcgcagcagcgacaaggcgcaaaaatcatctgctgcggtgaaaattagtgcagttcgttacctttgttacaaatttgactgagtccgtccaacgcagaaatcttcagcagcgctccgcgcttgaatctgcaacctgtcaaaggtcattcactggcatttacattgcgacaatccggcaggtagacaagcacacccccatcactatggcgcgcattattctacgtgaaatcacgctaaacggcagatcaaacagagtatctttgcgaatattttttcacatttgtgtcaagtggctgtgaggcggcaaaaaattccccctgaccaccggtaacaccgcattgagacagcacctgccactcgcttcggctgagtaccccggttgcgaaaacctgaaccggcattcctttacaggcttctaccaggctctgcaccagcagctgattttcactgcgtttttctatattgcgcgataaccccgaatgcagcttaatcacttcaacatcgagctgcttgatccagctggttccaaccagcgtcaaaccggcctgaaccacggcaattcgaatacctaaagcgttaaccaaccgcataaccggctgcaggcggccgatatattgacaaacatccgcctctgcaagttcaaaaataatacgtcgacggtgcgatttttcgcattgcatcaaagtatcgcgcagccagcgctggaatcgagggcggatcaaggactcgaccgtcacctgcagcgcgaggttttcttccggccaaaagcctaaaaacggcagcaatcgcgtaatttgcaaacggtcatactcctccgccaggccaaactgcagcaccatcggcatatattcggccgcaatcacctcttccttaccatcataaagacggcacattagctcacgatgatgtacgcgaccatcacgagtgacggcgggtttctggtaaagtcgcgggccgccgcggctaagcatttgctcgataagcgtacgccagcgcacgttgccacgccctttctccggcagagaatcgtcatagacggcccagctgttgctgccctgcagcaccgcattacgcgtggccgcttccgcatgctccattacctgggccgccgtttgtccgctgcggaaagcgcagatcccgatatgcatcatatcgtcacgatcgagaattcgcgtcggcggcagggcatccatagctttcaggagtaacccggcaatgctgtccgcctctttcaacgtgcgatgcggaagcagaacggcaaaatcgctgcggtggtagcgagccagcagtgcgccagggtagcgcataataaaagtggaaagcatgttgatcagcgtaaagtagtgctcttcggtcgctgcgcgcccccagttatcgcgcagcaggtcgaaatccggcaggcggatcatcattacgatgccgtatgaccccactttctcctgatcttcaagcagcgtcgacagctgattatcaaaaaataatcggttactcagcccggtttttgaatcctgcgcgacataggaacggatcagggtatccatgcggcttcgctgatcgctggcgaactgaagttcggatagcagcatatccagcgcgctactggtattcgctggccactcgtgtaccgaccctcgcacctgcggtccgcgttcgccattaagaatacgcgcagtgcggagttccagtagctcctggcccgccagctggcgacggatccagcgcacggaaaaaaagataatcagcaccataaaaccaatggcgatggagagcggcgcggtgatgtgcagtgaacggaagtaattggccatcggatccaggtacaccagatggattgccataccgggctgcttgagcgacggtaccgtgatatcgcgaaactgattgctgctacctaaaggacgatagttatcggtgcgggaatggctatagaccgatttgccattaagctgaaagtcaacgcgcgccgcgtcgatcggcgtcatcagctcatccatctgcggttcaatctggtcaaaagacatagagaccagacggttatccagcatggtcgccaccgcctgaacgcggttggtcatttttagctgaatgccgttgtaaaaactcagcgaagcgccaatcagcgtgacaaagatcgtcaggctggtgagtaacgtgacaaacgctgagaatttcgtcgttaatcgcatccctgtgttaactccgcgtgtgaatgactacccgataaacatccgggctcctgtgctggcgcctaaactaaagtaagcactaactttctaaagagcgacgcatactatcaaagctggcgcatctggcaatttattgcgttacatcggtgtaataatgccgttagcgagtatagtctgcagaaaaaattttccaatcatccaacctatgaggaccggcgcatgcaggctttaatcttagaacagcaggatggcaaaactctctcttcggtgcaaaccattgacgccagccagctgccgcagggggatgtgacagtggatatccactggtccagccttaactataaagatgcgctggccatcactggtaaaggaaaaattatccgcaactttccgatgattcctggcatcgattttgccggttttgtccacagcagcgaggatccgcgtttccacgccggccagcaagtcctgctgaccggatggggcgtaggggaaaaccactggggcggactggcggagcgcgctcgcgttaaaggcgactggctggtggcgatgccgcaaggcctggatggtcgtaaagccatggtcattgggaccgccggtttcaccgcgatgctgtgcgtgatggcgctggaagacgccggggttcgtccggaagatggcgaagtcgtggtcaccggggccagcggcggcgtcggcagcaccgcggtcgctttgctgcatcatctcgggtacaaggtggcggcggtttccgggcgcgaaagcacccatgaatatcttaaaagcctcggcgcgcagcgcattcttagccgcgatgagttcgccgaaacccgcccgctggaaaaacagctgtgggccggtgccgttgataccgttggcgataaggtgctggcaaaagtgctggcgcagatgaactacggcggctgcgtggcggcctgcggtctggcaggcggctttgccctgcccacgaccgtgatgccgtttattctgcgtaacgtgcgcctgcagggcgttgattcggtaatgacgccagccgcgcgccgggccgaggcctggcagcgtctggtgcgcgatctgccggaatccttctacgcgcaaagcgcgacggaaatctccctcgccgaagcccctgaatttgccgataagatcatgaccaataagattcaggggcgcacgctggttaaaatcgcctaatctgcaatttttcgtgacatattcgcaataacgctccgcctccgtcatgctaagaaaaacgcacgacggaggatgccatgaaatccaaaaaactgacggaagccgacgtaacggcagaatccgtttttatgctgcagcgtcgccagatcctgaaaatgttgggaattagcgccaccgccctttccctctcaccctccgcgcaagctgacctgctggattggtttaaaggcaacgaccgcccgccggcgccggcaggtaaagcgctgacgttcgataaaccggcgcaatggcaaaacactctcacgctcacgccggaagataaggtatcaggctacaacaacttttatgagttcggcctggataaagccgatccggcggccaatgccggaagcctgcgcactgacccctggacgctgacgattggcggcgaagtggcaaaaccccttacgctcgatcatgacgacctgaccagccgatttccgctggaagagcgaatttaccggatgcgctgcgtcgaagcctggtcgatggtgattccctgggtcggcttcccgctgcataaattgttatcgctggtcgagcccaccagcaatgcgcgctacgtcgcgtttaaaacgctttatgcgcctgagcagatgccgggccaaaaagaccgttttatcggcggcgggctggcgtatccctatgtcgaagggctgcggctcgacgaggccatgcatcctctgacgctgctcagcgtaggcgtgtatggcaaagcgctgcctccgcaaaacggtgcgccggtccgactcaccgtgccctggaagtacggtttcaaagggattaagtctatcgtcagtatcgaactgacgcgtgaacgtccccccacgacctggaacctcgccggacctgaggagtatggcttctacgccaacgtcaatccgcatgtcgatcacccccgctggtcgcaggcaactgagcgctttatcggcgcaggcggcgtactcgacgtcaaacgccagccaacactgctctttaacggctatgctgacgaagtagcatcgctctaccggggcctgaatttgcgggagaattactagtgcgcctgactgtaaagcagattacctggctgaaagtgcttctccatctggccggatttttgccttttgtctggctcttctgggccggacatcaggggtatttcagcgccgacccggcaaaggatatccagcactttaccggtaggatggctcttaaattcctgctggctaccttgcttgtttcgccgctggcgcgctacgctaaacagccgttattgatacgcacccggcgcttacttggtttatggtgctttgcctgggctacgctgcatttgaccagctatacgctgctcgaacttgggattaacaatctggcgctattgggtacagaagtcctcacccgcccttatctgacgctggggttaatcagctggctgattctgctggcgctggcggcgacgtcaacgcaagcgatgcagcgaagattgggtcgtcgctggcaaacattgcataacttcgtctatgttgtcgcgatcctcgcccccattcactacctatggtcggtgaagattttatccccccaaccgctcatttatgcgctgctggcgatcctgcttttagcatggcgatataagaagttccgccagtggtggcgctaattccggatatgtgcagtttcccgcagttcttttatcaaccgccactctttacacgatagcggttgataatcttccctgataagaccagtatttagctgccaaatgctacgaaatcgttataatgtgcgactttggttttcctgacgggctttttgagtcccgaaaaggtgacaatcgcgcatcgaaggtatattttgttttttacccgagaatggcagaagatagccgcatattggccgataagtttcgctttttgctttcgagcatcggaggcttaacctgtcggcttctgaagaagcgcggcgtcttgcaacagcagtaattcatatgctttacagacggtgctaacacgcctgtcacaatcacactaaacaaagagtacggaacccactcatggatattcgtaagattaaaaaactgatcgagctggttgaagaatcaggcatctccgaactggaaatttctgaaggcgaagagtctgtacgcatcagccgtgccgcgccaaacgcaggtttcccggtgatgcaacaggcttacgccgcaccgatgatgcagcaacagccagcgctgtctaacgcagtcgcctctgcggcaacgccagcaatggaagcccctgcggcagcggaaatcagtggccacatcgtacgttccccaatggttggtactttctaccgcaccccgagcccggacgcgaaagccttcatcgaaatcggtcagaaagttaacgcgggcgataccctgtgcatcgttgaagccatgaaaatgatgaaccagatcgaagccgataaatccggcgtggtgaaagccattctggtcgaaagtggtcaaccggtagaatttgacgagccactggtcgtcatcgaataacgaggcgaacatgctggataaaattgttatcgccaaccgcggcgagattgcattgcgtatcctgcgtgcctgtaaagaactgggcatcaagaccgttgctgtgcactcaacggcggatcgcgatttaaaacacgtattgttagcggatgagacggtctgtattggcccggctccgtccgtaaaaagctacctcaatatcccggcgattatcagcgctgctgaaatcaccggcgcggtggctattcacccgggttacggatttttgtccgaaaacgcaaacttcgctgagcaggttgagcgttccggctttatctttatcggtccgaaagctgacacaatccgcctgatgggcgacaaagtgtctgcgatcaccgcgatgaagaaagcgggcgttccgaccgtaccgggctctgatggcccgctgggcgaagatatggacgttaaccgcgcccatgcaaaacgtattggctacccggtgattatcaaagcctccggcggcggcggcggtcgcggtatgcgcgttgtgcgcagcgatgctgagctggcgcaatccatctccatgaccaaagcggaagccaaagccgcgtttaacaacgacatggtgtatatggagaaatacctggagaatcctcgtcacatcgagatccaggtactggctgacggtcagggtaacgctatctatctggctgagcgcgactgctccatgcagcgtcgtcaccagaaagtggtcgaagaggcgccagcaccgggcattacgccggaactgcgtcgctatatcggcgagcgttgttccaaagcgtgcgtcgatatcggctatcgcggcgcgggtacttttgagttcctgttcgaaaacggcgagttctatttcatcgaaatgaatacccgtattcaggttgaacacccggtaaccgaaatgatcaccggcgtcgacctgattaaagagcagctgcgcatcgcagccggccagccgctgtccatcaagcaggaagaagttgtggttaaaggccatgcggtggaatgccgtatcaatgccgaagacccgaacaccttcctgccgagcccgggtaaaattacccgcttccacgcgccgggcggttttggcgtgcgctgggagtctcatatctacgcgggctacaccgtgcctccgtactatgactcaatgatcggtaagctgatctgctatggcgaaaaccgtgatgtcgcgattgcccgcatgaaaaatgcgctgcaggagctgattatcgatggcatcaaaaccaacgttgatctgcagattcgcatcatgaacgacgagcatttccagaatggtggcaccaatatccactatctggagaaaaaactcggattgcaggagaagtaattctgccatcgctgcaaaaggccggataatccggccttttttctttttctctcctctcctcttttccatgcggtacaatccccgctttctttatcctcaagggacaaaaaatggacaaacgctttgttcaggcccataaagaggcgcgctgggcgctgtggctaacccttctctatcttgcggcctggctggctgccgcctatctgccgggcgtcggtattggcctaaccggcctgccgcactggttcgaaatggcctgcctgctggtaccgctggtgtttattctgctgtgctgggcgatggtaaaagttatctatcgcgatattcctctggaggatgacgatgcagcttgaagtcatactgccgcttatcgcctacctgctggtggtgtttgctctctccatctatgcaatgcgtaagcgcacaacgggttccttcctgaacgaatatttcctcggcagccgctcgatgggcggcattgtattagccatgacgcttaccgctacctatatcagcgccagttcgtttataggcggccccggcgcggcctataaatatggcctcggctgggtgctgctggcgatgatccaactgccggcgatctggctttctctggggattttgggtaagaaattcgccattctggcgcgccgctataatgccgtaaccctgaacgatatgctctttgcccgctaccaaagccgtctgctggtctggctcgcgagcctgagccttctggtggcgtttgtcggggcaatgacggtgcagttcatcggcggggcgcggttgctggaaaccgcggcgggtattccctacgaaaccggtctgctgatttttggcgtgagtatcgcgctctataccgcgttcggcggttttcgtgccagcgtcctcaacgacacgctccagggaatggtgatgctggtcggcactatcgtcctgctggttggcgtcgttcatgcggcgggcgggctacataatgcggtagaaaccctgcaaaccatcgatcctaagctggtttccccgcagggggctgatgacattctttcccccacctttatgacctccttctgggtgctggtctgcttcggggtaattggcctcccgcacaccgccgttcgctgcatctcctataaagacagcaaagcggtgcaccggggaattatcattggcaccatcgtggtggcgatcctgatgtttgggatgcatcttgcgggtgcgttaggccgggcggtgatcccggatctgacggtgccggatctggtcatcccgacgctcatggtgaaagtattgccgccctttgccgccgggatcttcctcgccgcgccgatggccgccattatgtcgacgatcaacgcccagctgctgcaaagttccgctacgatcattaaagatctgtatctgaatctgcgccccgcgcagataacaaatgaagcccggttgaagcggatgtcggcaacgatcaccttgctgctgggcgctttactgctgctggcagcctggcgtccgcctgagatgattatctggctcaacctgctggcgttcggcggcctggaggccgtgttcttatggccgctggtgctgggcctgtactgggaacgcgcgaacgcgaaaggggcgttgagcgcgatgatcgtcggcggcgtactctatgccatactcgccacttttaatctgcagtacctgggcttccatccgatagtgcccgcgttgctgttaagcttattggctttcctggtcggaaaccggttcggtacctccgccccgcaagccgccgtattgactactgataaataaagagttttgccatgccatggatccaactgaaactgaacactaccggcgcgaacgcggaagaactgagcgatgcgttaatggaagcgggttccgtttccattactttccaggatacgcacgacacgccggtattcgaacctctgccgggcgaaacccgtctgtggggcgatactgacgttatcggcctgtttgacgccgagaccgatatgaaagaagtgattgcgatgctggagcagaatccgctgctgggcgccggtttcgtgcataaaatcgaacaactggaagacaaggactgggagcgcgaatggatggataacttccaccctatgtgcttcggtaaacgcctgtggatctgcccgagctggcgcgatgtgccggatgaaaacgccgttaacgtgatgctcgacccgggcctggcgtttggtaccggtacgcatcccaccacggcgatgtgcctgcagtggctggatggcctcgatctcgcgggcaaaacgattatcgattttggctgtggctcaggcattctggccattgcggcattaaagctgggcgccgcgaaagctatcggtattgatatcgacccgcaggccattcaggccagccgcgataatgccgagcgtaacggggtttctgaacgcctggaactctatctgcctaaagatcagccagaggcgatgaaagccgatgtggtggtcgcaaacattctggccggcccattacgcgaactggctccgcttatcagcgtgctgccggttacaggcggtctgctggggctttccggcatccttgccagccaggcggaaagcgtttgtgaagcgtacgccgatctctttaacctcgatcccgtcgtggagaaagaggagtggtgccggatcaccggttataaaaagtaatctccctgtggcctcatcgcaggccaccgcttttcgcgctttctgcacaaaatcattcgctcaatgagaataagatgatgcggtaacgtattgtagttaccaataaaatcataaatttattcattggacgaatgatatgaaaacaactttaggcaaggcggcattactggcgttaagcatgatgcccgtgacggttttcgcttcccactggagctatgaaggcgaaggttcgccggaacactggggggcgctcaatgaggagtacaaaacctgtcaaaatggtatgaatcaatcccctatcaacatcgataccacgtttaagacacacctttcaccgctggatacgcactacatcgatggccccattacgctcatcaacaatggtcacactatccaggcggggttaaagaccacaacagcggataccgttacgattgacggtacgccatttacccttcagcagttccattttcatgccccgagcgaaaacaccgttcacggtaagcactatgcgatggagatgcatctggtacataaaagcgctcaaggcgccgttgccgtcgtggcggtgatgttcgaccagggcgcggaaaatagcgaactgaacaaactatgggccaccatgcccgagaaagccgatcagacggctaaaatcgtcacccaaatggatctcaacgcccttcttcccgcagacaagacatactggcgtttcagcggctccctgaccacgccgccttgctccgagggggtaacctggattgtgcttaaacatcccctgacactttcatcagcgcagctggcaaaatttagccacgctatgcatcacgataacaatcgtccggtacagccgctgaatggtcgcgtggtcatagaataaacatcagctgtgcttcacgatcatgttctgaaatgagagccaactcacataaagccaaggtaatttgctgatttcttcagcagattatcttgcccgttccctgcgtcgggaagaaaaaatgagaagttagacaaaattatatgtgtagataaattcatcacatgtttttaatgcaatgatttatatagctaattattcatgcacactgacctgcaaggcgattctttgatccaccgcagaggattgctcaaagtttggcctttcatctcgtgcaaaaaatgcgtaatatacgccgccttgcagtcacagtatggtcatttcttaactcatgcgcatcggacactaccagctcaggaatcgactcatcgcagcgcctatggctggcattactgacagaccattccgcacgttgtgttacgagatgggagcaggattgaccgtatccgagatgatgtcctccaacccgcaggtttgggagagcgacaagtcacgcttacggatggtgcacgttgatgagcccggtattcgtaccgtgcaaatcgccggtagcgtaccggaagagatggctgcagccgcccgtattaacgtggaaagcggcgcccaaattattgatatcaatatggggtgcccggctaaaaaagtgaatcgaaagcttgcaggttcagccctcttgcagtaccccgagcaggtgaagtctatcctgacggcggtcgtcaaagcagtggacgttcccgtaactctcaagattcgcaccggttgggaaccggaacaccgtaactgtgtagaaattgcccaactggctgaagaatgtggcattcaggctctgactattcacggacgcacgcgcgcctgtttgtttaacggagatgctgagtacgacagtattcgggcagttaagcagaaagtttccattccggttatcgcgaatggtgacattactgacccgcttaaagccagagctgtgctcgactatacgggggcagatgcccttatgataggccgtgcagctcagggaagaccctggatctttcgggaaatccagcactatctggacactggagagctgctgccgccgctgccgttggcagaggttaagcgcttgctttgtgcacacgttcgggaactgcatggcttttatggccaggcaaaagggtaccgaatcgcacgcaaacacgtatcctggtatctgcaggaacacgctccagatgaccagtttcggcgcacattcaacgccatagaagattccagcgaacagctggaggcgttggaggcatacttcgaaaattttgcgtaatagaaataaagagctgacagaactatgttcgaacaacgcgtaaattctgacgtactgaccgtttctaccgttaactctcaggatcaggtgactcaaaagcccctgcgtgactcggttaaacaggcactgaagaactattttgctcaactgaacggtcaggatgttaatgacctgtatgagctggtactggctgaagtagaacagcccctgttggacatggtgatgcaatacacccgcggtaaccagacccgtgctgccctgatgatgggcatcaaccgtggtactctgcgtaaaaaattgaaaaaatacggcatgaactgatactaatcagttaaatgtttgatataaaaggcgctcttcggcatggggaagcgccttttttattacatgaattttaatggctggctatcgtctgccgcccgttagccccgcaaaggatcgacataatattatcaaccagggcgggtgcctggcggtacagatcgaattgcccgggctccaccagccagtttttaataataccggtaaatgcgctgtgtaatacaattaatgaaatttcaacattggtttccgctggcaataatccgttacgaatacagagctgcaaaatgctgcgaataatcggatagctaaaaccaattctcttgcgaatctcagcttccggcatcatgtcgctggaaaactcacacttctgatacagaatttgcattaaggcacgttgacggggattattagcgatatattgtaagccaataataaatttctctcgtagcgtgctgagcggatcctgatcgtctttaaggttaaattcatgctgaagcaggtcgcgtagcggcagctgctgttgccacatttcattaaatagctcagctttgcttgcaaagtgccagtacaccgctccgcgcgtcacgccagcagcatcagcgatatcggctaaggtcgtgctggtcacgccacgtaaggcaaactgctgaatggcagactcaatcagaagctgccgcgtctttaacgcatcttctttcgttcttctgggcatacggtgctccactcaacgccagattgagagtgtggggaaatcgctggatacctataaacctaacatctgacaatcaatattgtttagcaaaaatacagatgagttaaatctcaaacgctccccaataaatacaccacaagaataattaagataaatacattcatatattaaatatcaatgtaagcaaattttaatttaagttcattctaaaaacattattcctgatattttgtttttacgtgccttgctgatggctaaaaaataactatgtcttacatccatcgttttttatttgtaggataacaaaccgcattttaattcattatttcttgcacagattcgtggccatgcctggctcataatctataaggaacagcaatgacacctcatgtcagggttacacttttatccagccttatcatcccggccatcctgctcagcggttgcgataattcaggcgatcggcaaccgcatgcgcagatacctcaggtctccgtttatgtcgtacacagcgcgccgctgtccgtcaccacggagctacctggccgcacatctgcctaccgcgtcgcggaagtccgcccgcaggtcagcgggattatcctgcaacgtaactttgtcgaaggtagcgatgtcaccgctggacagtctctttatcaaatcgatccggcgacttatcaggcggcttacaacagcacaaaaggtgatgaagcgaaagcagaagccgcggcggctatcgcccacttaacggtcaaacgctacgcgcctcttctcggcacaaaatatatcagccagcaagaatacgatcaggcggtggcgaccgcgcgccaggccgatgccgacgttatcgccgcaaaagcagccgtggaaagcgcgcgtattaacctggcgtacacaaaagtgacgtcgccaatcagcggccgcatcggcaaatccagcgtgaccgaaggtgccctggtgacaaatggtcaggctgacgcaatggcgacggtacagcagctcgatcccatttatgtggatgtcaccgaatccagtaatgatttcatgcgcctgaaacaggaaagcctgcagcacggcagtgacaccaaaagcgtgcagttgattatggaaaacggaaaaccttatgcgcttcagggcacgctgcagttctctgacgtcacggtagatgagagcaccggctcaattacgcttcgcgccatcttccccaacccacagcacgctctgctgccagggatgtttgttcgcgcccgcattgatgagggcgtttcaccgaatgccattctcgttcctcagcagggagtcacccggacgccgcgcggcgatgccagcgtgatgctcgttaatgataaaaacctggtggaaacgcgagccgtcaccgcctcacaggcgattggcgataagtggttaatcacgagcggtctgaaagccggtgaaaaggttatcgtcagcggtctgcagaaagtacgtcccggcgtcaccgtgaaggccgaagaggataccgcgacgtccgtcgcgcaataaggtacaaatccctatgtctaagttttttatccatcgaccggtcttcgcctgggtgctggcgatcatcatgatgattgccggtggcctcgcaattatgcagctaccgattgcacaatacccgactatcgcgccgccagcggtggccatctccgcaacctatccaggtgcggacgcacaaaccgttcaggatacggtgactcaggttatcgaacagaacatgaacggtatcgataatctgatgtacatgtcctcaaccagcgattccgcaggcggcgttaccatcaccctgacctttaaatcaggtacggatccggatattgcgcaagttcaggtgcagaataaactgcagctggcgacgccgcttcttcctcaggaagtacagcagcaggggattagcgtcgagaaatcaagcagtagtttcctgatggttgctggattcatctccgataacacaagcactactcaggatgatatatccgactacgttgcatcgaacgtcaaagataccatcagccgccttaacggcgtcggcgatgtacagctcttcggcgcgcagtatgccatgcgcgtctggctggatggtaatctcctgaataagtacaacctcacgcctgtcgacgtcattaaccaactgcaggtacagaacgatcagattgcagcaggccagcttggcggtacgccggcccttaaaggccagcagctaaatgcatccattattgctcagacgcgactgaaggatccggcagagtttggcaaagtgactctgcgcgtgaacgcggatggctcagtggtgcacctgaaagatgtggcccgtattgagctgggaggtgaaaactacaacgttgtcgcaaaaatcaatggaaaaccggcttcaggactgggaattaagctcgctaccggcgccaatgccctcgataccgccgccgcgattaaagcgaagcttgccgaactgcagccgtacttcccgcaggggatgaaggtcgtctatccctacgacactacgccgtttgtgaaaatctctattcatgaggttgtgaagacgctgtttgaagcgattatcctcgtcttcctggtgatgtatctgttcttacagaatatccgggccacgctgatccccaccattgcggttccggtcgtcctgctcgggacctttgccgtactggcaatgttcggttactccatcaatacgctaacgatgtttggtatggtgctggcaataggccttctggtcgacgatgctatcgtggtggtggaaaacgtcgaacgcgtcatggtagaagagaagcttccccccaaagaagcgacggaaaaatcaatgtcgcaaattcagggggcgctggtcggcattgccatggtgctatcggcagtgtttgtcccgatggccttctttggcggctctacgggggcgatctatcggcaattttctatcaccatcgtctccgccatggcgctgtccgtactggtcgcgctgatcctgacccccgcgctttgtgccacattactgaaacccgcatcagccgatcatcatgagaaaaaaggattttttggctggtttaatgcgaaattcgatcgtagcgtgaaccactacactaacagcgtcagcgggattctgcgctgtaccggacgctacctgatcatctatttgctgatcgttgtgggtatggccgtcctgtttatgcgcctgcccacctccttcttgccggatgaggatcagggggtatttatgaccatgatccagcttccttcaggcgcaacgcaggaacgcacgcaaaaggttcttgatacggttaccgattactatctgcataaagagaaggcgaatgttgaaagcgtctttaccgttaacggctttagctttagcggtcagggtcaaaactccggtatggcgtttgtcagcctgaagccatgggaagaacgcagtggcgcagagaatggcgttgaggcaatcatcaaacgtgcgaccgttgccttcagtcagattaaagatgctatggtctttcctttcaatctgccggcaattatcgagctgggtacggcgaccggttttgactttgagcttatcgatcagggtaaccttggccatagcgcgttaaccctggcccgtaatcaacttctgggtatggtgagagagcatcctgaccagctggtacgcgttcgccccaacgggctcgaagacacgccgcaattcaagctggatgttgatcaggagaaagctcaggctctgggtatttcgctatccgatatcaatgaaaccatttccgcggcgctagggggttactacgtcaacgactttattgaccatggacgagtgaaaaaagtctacgttcaggccgatgcaaaattccgtatgctgccgagcgatatcaataatatgtacgtccgcagcgcgaatggcgaaatggttccgttctccgcctttgtcacctcacgctgggtttatggttcaccgcgcctggagcgctataatggcttaccctctatggaagttttgggtgaagctgctccggggaaaagtaccggcgatgcgatgattttaatggagcagttagccagcaagcttcctgccggtattggttacgactggacaggaatgtcctatcaagaacgtttatccggtaaccaggcgcccgcgctctatgccatttcgcttattgttgtctttctgtgtcttgcggcgctttatgaaagttggtctattcccttctccgtcatgctcgtcgttccattaggggtagttggtgcattactggcagcatcgttacgcgggcttaataatgacgtttatttccaggtgggcttattaacaactatcggcctctctgcgaaaaacgcgattcttatcgtggagtttgcgaaagacctgatggataaagaaggcaaaggaattatcgaagccacacttgaagcatcgcgtatgcgtttacgccctatcctgatgacttcgctggcctttatcctcggggttctgcctctggttattagccatggagccggcagcggcgcccaaaacgcggtcggtaccggcgttatgggaggaatgctgacggcaacattactggcgatcttctttgttcctgtcttcttcgtcgtggtaagacgccgctttacgaaacacgcagagtaaatatgtttttctaaaggcacctttcaggtgcctttttttcgtctgcgtttcgataactatcctgatgatattaaatatatttatttctgcggtacccaatacacattatttccccatagttctctggttttcttcatgatatttacgttactcataaattgagattatttactctagcggcaccccatattgctgatgataaaataaaccgttccgcgcaggtatgggttctccaatacagcgaagcggattatttagaggtaatatcatgaataaagttattatagtggcattgctggcaacgctactcgccggctgtgcacatgactctccgtgtgtaccggtctatgattctgaaggcagattagtgcacaccaatacctgtatgaaaggaacgacccaggataactgggaaaccgccggcgcgattgccgggggcgcagctgccgtcgctggcctgacgctcggcatcgtggcgttgactcgttaattcctttcttttctctgccatgacaggtgccggagcgagctccggcactgcttttccccgaaggtaagctccacaatgcttaaactgcaataccggcagctgaagctcgggaaacgatcctttagataagatcaaatgggcaaattgtcattgccaggtctggtataaatggatattttctcagccgcataaacgcaaaaagcccatccgtcaggatgggcttttcacttatttgatgcctggcaatgccctactctcacatggggagaccccacactaccatcggcgctacggcgtttcacttctgagttcggcatggggtcaggtgggaccaccgcgctatcgttgccaggcaaattcttttcaaatcgccgaactttaacctaaaaactggtgctgatacccagagtcgaactggggacctcacccttaccaagggtgcgctctaccaactgagccatatcagcacacttaatttgatgcctggcagttccctactctcacatggggagaccccacactaccatcggcgctacggcgtttcacttctgagttcggcatggggtcaggtgggaccaccgcgctgtcgccgccaggcaaattctgttgtcagaaacgaatcttttatctttcgttcctgaaatctgtaatctaagctgaaaatctctcaatccgccaaaacatcttcggcgttgtaaggttaagcctcacggttcattagtaccggttagctcaacgcatcgctgcgcttacacacccggcctatcaacgtcgtcgtcttcaacgttccttcaggacccttaaagggtcagggagaactcatctcggggcaagtttcgtgcttagatgctttcagcacttatctcttccgcatttagctaccgggcaatgccattggcatgacaacccgaacaccagtgatgcgtccactccggtcctctcgtactaggagcagcccccctcaattctccagcgcccacggcagatagggaccgaactgtctcacgacgttctaaacccagctcgcgtaccactttaaatggcgaacagccatacccttgggacctacttcagccccaggatgtgatgagccgacatcgaggtgccaaacaccgccgtcgatatgaactcttgggcggtatcagcctgttatccccggagtaccttttatccgttgagcgatggcccttccattcagaaccaccggatcactatgacctgctttcgcacctgctcgcgccgtcacgctcgcagtcaagccagcttatgccattgcactaacctcctgatgtccgaccaggattagctgaccttcgtgctcctccgttactctttaggaggagaccgccccagtcaaactacccaccagacactgtccgcaacccggattacgggcccacgttagaacaccagccattaaagggtggtatttcaaggatggctccatgcagactggcgtccacacttcaaagcctcccacctatcctacacatcaaggaccagtgttcagtgtcaagctatagtaaaggttcacggggtctttccgtcttgccgcgggtacactgcatcttcacagcgagttcaatttcactgagtctcgggtggagacagcctggccatcattacgccattcgtgcaggtcggaacttacccgacaaggaatttcgctaccttaggaccgttatagttacggccgccgtttaccggggcttcgatcaagagcttctccttacggatgaccccatcaattaaccttccggcaccgggcaggcgtcacaccgtatacgtccactttcgtgtttgcacagtgctgtgtttttaataaacagttgcagccagctggtatcttcgactgatttcagctccatgagcaagtcacttcacctaccatcagcgtgccttctcccgaagttacggcaccattttgcctagttccttcacccgagttctctcaagcgccttggtattctctacctgaccacctgtgtcggtttggggtacgatttgatgttacctgatgcttagaggcttttcctggaagcagggcatttgtcacttcagcaccgtagtgcctcgtcatcacacctcagcgttaataacgttccggatttacctggaacatccgcctacatgcttaaaccgggacaaccgtcgcccggccaacatagccttctccgtccccccttcgcagtaacaccgagtacaggaatattaacctgtttcccatcgactacgcctttcggcctcgccttaggggtcgactcaccctgccccgattaacgttggacaggaacccttggtcttccggcgtgcgggtttttcacccgcattatcgttacttatgtcagcattcgcacttctgatacctccagcaaccctcacaggccaccttcaacggcttacagaacgctcccctacccaacaacacatagtgtcgctgccgcagcttcggtgcatggtttagccccgttacatcttccgcgcaggccgactcgaccagtgagctattacgctttctttaaatgatggctgcttctaagccaacatcctggctgtctgggccttcccacatcgtttcccacttaaccatgactttgggaccttagctggcggtctgggttgtttccctcttcacgacggacgttagcacccgccgtgtgtctcccgtgataacattcttcggtattcgtagtttgcatcgggttggtaagtcgggatgaccccctagccgaaacagtgctctacccccgaagatgaattcacgaggcgctacctaaatagctttcggggagaaccagctatctcccggtttgattggcctttcacccccagccacaagtcatccgctaatttttcaacattagtcggttcggtcctccagttagtgttacccaaccttcaacctgcccatggctagatcaccgggtttcgggtctataccctgcaacttaacgcccagttaagactcggtttccctgcggctcccctatacggttaaccttgctacagaatataagtcgctgacccattatacaaaaggtacgcagtcacccaaccagtgggctcctactgcttgtacgtacacggtttcaggttctttttcactcccctcgccggggttcttttcgcctttccctcacggtactggttcactatcggtcagtcaggagtatttagccttggaggatggtccccccatattcagacaggataccacgtgtcccgccctactcttcgagttcacagcctgtgcgttttagtgtacgggagtatcaccctgtaccctgcgactttccagacgcttccactaacacacaagctgattcagactccgggctgctccccgttcgctcgccgctactgggggaatctcggttgatttcttttcctcggggtacttagatgtttcagttcccccggttcgcctcgttaacctatgtattcagttaacgatagtgcaacgaattgcactgggtttccccattcggacatcgccggctgtaacggttcatatcaccttaccgacgcttttcgcagattagcacgtccttcatcgcctctgactgccagggcatccaccgtgtacgcttagtcgcttaacctcacaacccgaagatgtttcgtaaaacatcgtcgtgtcgcgaaaatttgagagactcgaacacacttaaacagtgtgtcgtttcaattttcagcttgatccagatttttaaagagcaaatatctcaaacgtcacccgaagatgagttttgagatattaaggcaggtgactttcactcacgaaccagcaagtggcgtcccctaggggattcgaacccctgttaccgccgtgaaagggcggtgtcctgggcctctagacgaaggggacactaaagtctcaatcgcaagacgccttgctatttacttttcatcagacaatctgtgtgagcactacaaaggcaggttctttaaggtaaggaggtgatccaaccgcaggttcccctacggttaccttgttacgacttcaccccagtcatgaatcacaaagtggtaagcgccctcccgaaggttaagctacctacttcttttgcaacccactcccatggtgtgacgggcggtgtgtacaaggcccgggaacgtattcaccgtggcattctgatccacgattactagcgattccgacttcatggagtcgagttgcagactccaatccggactacgacatactttatgaggtccgcttgctctcgcgaggtcgcttctctttgtatatgccattgtagcacgtgtgtagccctactcgtaagggccatgatgacttgacgtcatccccaccttcctccagtttatcactggcagtctcctttgagttcccggccgaaccgctggcaacaaaggataagggttgcgctcgttgcgggacttaacccaacatttcacaacacgagctgacgacagccatgcagcacctgtctcacggttcccgaaggcaccaaagcatctctgctaagttccgtggatgtcaagagtaggtaaggttcttcgcgttgcatcgaattaaaccacatgctccaccgcttgtgcgggcccccgtcaattcatttgagttttaaccttgcggccgtactccccaggcggtcgacttaacgcgttagctccggaagccactcctcaagggaacaacctccaagtcgacatcgtttacagcgtggactaccagggtatctaatcctgtttgctccccacgctttcgcacctgagcgtcagtctttgtccagggggccgccttcgccaccggtattcctccagatctctacgcatttcaccgctacacctggaattctacccccctctacaagactccagcctgccagtttcgaatgcagttcccaggttgagcccggggatttcacatccgacttgacagaccgcctgcgtgcgctttacgcccagtaattccgattaacgcttgcaccctccgtattaccgcggctgctggcacggagttagccggtgcttcttctgcgggtaacgtcaattgctgaggttattaacctcaacaccttcctccccgctgaaagtactttacaacccgaaggccttcttcatacacgcggcatggctgcatcaggcttgcgcccattgtgcaatattccccactgctgcctcccgtaggagtctggaccgtgtctcagttccagtgtggctggtcatcctctcagaccagctagggatcgtcgcctaggtgagccgttaccccacctactagctaatcccatctgggcacatctgatggcaagaggcccgaaggtccccctctttggtcttgcgacgttatgcggtattagctaccgtttccagtagttatccccctccatcaggcagtttcccagacattactcacccgtccgccactcgtcacccgagagcaagctctctgtgctaccgttcgacttgcatgtgttaggcctgccgccagcgttcaatctgagccatgatcaaactcttcaatttaagtttgatgctcgtgaattaaacttcgtaatgaattacgtgttcactctttgagacttggtattcatttttcgtcttgcgacgttaagaatccatgtcactttgagtgcccacacagattgtctgataaattgttaaagagcagtgcaacgcggctttcgctcaccgttgcgaggtggcgtatattacgctttcctctttcagagtcaacccgttatttcaggattttttctcttcaaccgaccgggttgtttgtgaagtgattcacatctgccgtgtcagtgggagcgcattatagggatcccatttttttgcacaagccttttttcgatctttttttccaaatgatggtttttcagccgcttcgcggcgttcttgctcaatccgctcaatttttaccacaataaggggttgcagacggccagaaaagcaaccaaagtctctgcactcccttcttttattgaggtaaccatgaccaccagcttgcgtcgttataaagatttattccctaaaacgggcctacgcgtgatgatcgacagcagcagcgtggtgatcggcgatgtcagaatagctgacgatgtcagtatctggcctctggtcgccattcgcggtgatgtgaactatgtggaaataggcgcccgcactaacattcaggacggtagcgtcttacatgtcacgcataagtcttcatctaatccacagggcaatccacttatcattggcgaggatgttaccgtcggccataaggtgatgctacacggctgcactattggtaaccgggtcctggtcggtatgggttcgattttgttggatggcgtgattgttgaagacgatataatgattggggctggcagtctggtgcctcagaacaaacgtctcaagagtggctatctttactttggtaacccggtaaaacagatacgccccctgacagaggcggaaattgccgggctacaatattcagcgaacaactatgtaaagtggaaaggtgattacctggctcaggaaaaccagatccaaccttgagcatcttcttgctggtcgagaatgagatcctgggcttcatcttccagatcccagcgatgttcacgaaaagcggccagccattgcgccggctcttcaccgccaaaacgcttcttgagcaccgtaagcgttaaggcgcaggtaagctgcatgccgttaactaatgcaggaaaagcgatacattgacgcgcttcatcccatacctctctgtctggaaactgaattgcctggttcatgcattcagttccttctgcaaagccgcaatgactggcgtaatttctggcagaacgccgtgccacaacagcaccgcatgagcagcctgcgccaccagcattcccaacccatcagcgcattttgtcgcaccgtgttgctggcataaggataaaaatggcgtactacctttctggtaaaacatgtcataacaacagacatggggatttattaaggtaacagggatcgcgggaacaccgccgtcaataccgctggatgtcgcattaataatgagatcaaattcctgaccgcctaatgcttctatatccaaagcgcggacgctgccggtatgagcaaaaagcgtagccagttcatgggcgcgagaataggtacgattaacaatagtcacggcacaatccagcgacaggagaggaagcaaaacgccgcgtgaagccccacctgcgccaataagcaatacccggaatcctggtttaataaaacccagccgttccagatcgctcagtagtccaataccatcggtattgtcccccagcaggcggccatcctccaaccgtttaagcgtattgaccgcaccggccagcgctgcgcgttcggttagctcatctgctcgcgcgaaggcctcttctttaaaaggcacggtgacgttcgctcccttaccgccttcattaaagaaggtatcgagcgtcgtaacgaaatcatcgagcggagccaggatacggccatagggatgcgtaatttgcaactgctgagcaaaaagccgatgaattgatggcgacttgctatgggcaatagggtgtccgaagacggcataagtttccatgagttacccctggcggaagagttcgcccgtcaaggcatcacgtatttcagatgggttttgacgccctcccgtagccccgtcaacgaccgggaaatcagcgccaaactgcgcataaacttctgccgtcgtgcggcaaggaggctggccagacaaatttgcgctggttgaaaccagcggttttccgtaagcattacacagttcgaccaccagcggatgatccgtgactcgcacagccagtgaattgaagcgccccgtcaaccaacgcggcgttgaagcgcaagcggggaagacaaatgtcacaggccctggccagcaagaaaaaatcgtctccagctgctcatcgctaagttgcgtatcgtcaatatagggtttgagttgctcgaagttcgccgcaatcaggatcagccccttttcaacgggacgctgtttaagtgcaagcaggctcatgacggccttttcgctatcgggatcgcaaccgacgccaaaaacggcttctgttggataggcgatgacatgttcattattcagaagcgccacagcacgtacgatggcttctgagggcaggttattattcacagatttattccgccggtatcggctttccacattgtttgctggcacagaagcgtttaacgccctgcgccgttttcttttcgattagcaacgggtaatgacactctggacactcgcccgccactggcctgaagtttatgacgaactggcaatcggggtaacgatcgcaggaatggaagttttttccaaaacgtgagcggcgctgaaccaaatgcccttgcccgcactgtgggcaggcaattgcggtttcatccggcttatcgataagttcagtatgttcgcaatctggatagctgctacaaccgataaacataccaaaacgcccctggcgtagtaccagcactgcgccgcaagacgggcacgtttgcccctccagaactttgacaatatgtccgtccgcctgatttttcaggggccggacatagtcacagtcaggataatgcgagcagccgagaaaaggcccgtgtttcccggagcgtattaccagttcagccccacactgcgggcagggttcgtttttacgcaccgagaacagcgctgttttggtcataacaattctaatgtcgcagcaaaaaagttagtgcagcataccttcatttacttcaaagagtaattcttccatttgctggtaggcattttcgcaaccgggaatattgaacagcaccatcaggatcacccatttgagatcttccagatcgaactctgccgtatccagcgccagtacacgctcaatcaccatttcccgtgtttcgaggttcaacacctgaatttgctcaaggaataataagaatccccggcagcttgcatcaagacgctggcactcgtcgtcggtgtagactcgtaacgagagtgggtcagaagcaagctgcattggcgcaacaagcccctcctggtaatcagccagtttctccagccacatcagggcgttatagatatcttctcgttcaaaaccggcatcggtcagatcccgagtcagcttgtcctgatccacgcgcatttctgcttcgttatggatgtaagtttcaaacagatacatcagtacgtcgaacatggcttgccctccttaatcggacatagccgccgggtacagctgcgatccagcctgctaactccagttctagtagctgggctacggttactggcacagattggccggcacgttcagcgacaacgtcaacaggtgttacctcatctcctacgttagccaggagctctggaaatggcaatgctacagaaggccgattaccgcaattatttgcgtcatctggttcaggaagaacatatggcagctcatcccgccagtattcgacgatgtcttccggggctgtcacgggaatcgcgccctgcttgataagccagtggggaccttctgaacccgggctgccaatcggccctggcagggcaaacacatcccttccctgctccagagcataacgaaccgtcactaatgagccgcttttcagggccgcctcaataaccaacacgccggcacttagcccgctgataatccggttacggcgaggaaagttgcccggcaggggcggggtaaacagcggaaactccgaaatgatggcgccgcagctgtttgtaatctgctccgctagcgcctgatgacggcgaggatagatctctcttaagccattccctaaaacagcaaccgttttacctttcccttccagcgcaccacgatgagcaattccatcaatgccaagggccaggccgctcgtgatcgtaataccataacgtgctaaagcttcgctaaagagtttcccccaacgagcgccataccatgaatgcgcccggctcccaatgacggacagctgccggctgctcagtagcgcagggtctccacatactaaaagagcgcaaggaaagtcgacaatcgcccgcagctggggtgggtaaagcggatcttcggcagtcagtagatagcaatttggtcgctccagccattgcagcgtggcatctatctcgcattggttaacgctgaggaaatgcttcgattgcgccagactcaagccacaggctcgcaaatcttctcgacctaacgtcgcagatgcacatagctgacgggcggcactgatagcactctcgccatacaggctgctcaccctcatcaaacgtaaccaaatttccctgggcgtcatccctatccccctgccacaagcgactttaacaatctttgcgattggacagcgagactgtcaattgcagggggttttgtctagaatagaggtaataatctttccaactcctgaacacaactctggataactatgtcagttttgcaagtgttacatattccggacgagcgccttcgcaaagtcgcaaagccggtagaagaagtaaatgcagaaattcagcgtatcgtcgatgatatgttcgagacgatgtatgctgaagaaggtatcggtctggccgcaacgcaggtggatattcaccagcgtattattgttattgatgtatcagaaaatcgtgaagagcagctggtattaattaaccctgagctgctggaaaaaagcggagaaacaggcattgaagagggctgcctctctattcctgaacagcgtgctttagtgccgcgtgcagaaaaagtgaaaatccgcgcgctcgatcgcgaaggcaaaccttttgagcttgaagccgacggtctgctggccatctgcattcagcacgagatggatcacctcgtcggtaagctgttcatcgattacctgtcaccgctcaagcaacaacgcattcgtcaaaaagttgagaaacttgatcgtctgaatgctcgagcttaaggacgagaataaacgtgtcagactcactacgtattatttttgccggcacccctgactttgcagcacgtcatctcgacgcgctgctgtcctctggacacaacgtggttggcgtcttcacccaaccggaccgtccggcaggtcgtggtaaaaaactcatgcccagcccggtgaaagttcttgctgaagaaaaaggcataccggtattccagccagcttcactacgtccgcaggaaaatcagcagctcgtctccgatctgcgtgcagacgtcatggtcgtcgtagcctatgggctccttctaccaaaagccgtgctggatatgccgcgcctgggctgcattaacgttcacggttcgttgcttccgcgctggcgcggcgcggcgcccattcagcgttcgctgtgggctggcgataccgagaccggtgtcaccatcatgcagatggatgtcggcctcgatacgggtgatatgctgtataaacttgcgtgcccaatcacggccgaagacaccagcggaacgctgtacgacaagctggctaaactggggccgcaggggctgatcgacacccttaagcagcttgctgcaggtaccgcgaaaccggttgtacaggatgaagcgctggttacccatgcgcaaaaactcagcaaagaagaagcgcgtatcgactggtctcttccagccgctcagttagaacgctgcattcgcgcctttaacccgtggccaatgagctggatagaaattgatggccagccggtaaaagtctggcaggcgtcggttatcgatgtggccacaacagccgaaccggggaccatcattgaagcgacaaaacaggggattcaggtggcgaccagcgacggcgtgctgaatttactctcgctacagcctgccgggaaaaaagcaatgagtgctcaggatctattaaactcgcggcgggaatggttcgctcctggcaaccgtctggtctgacgcgcccttcttaatacgcccggtgttgccgggcatttttattttgtgcttatgaaaaaacaactcaatttacgcagcctggcagcgcaggccgttgaacaggttctcgaacaagggcaatccctgagcaacgttctgcccccgctgcaacaaaaagtatccgataaagacaaagcgctgcttcaggaactctgctttggcgtgctacgtaccctttcccagttagattggctgatcggcaagctcatgtcccggccgatgacgggtaaacagcgtgttgtgcactacctcattatggtgggcatttaccaactgctgtacacacggattcctcctcatgctgcattggcggaaacggttgaaggcgcagtagcaattaagcgcccgcagctcaaagggttgattaacggcgtattgcgccagtttcagcgccagcaggaagaactgttatctgaattttctcgtagcgaaattcgctttttacatccgtcctggttgttgaaacgtctgcagaaagcctatccagcacagtgggaagcgatcgtggaagcgaacaaccagcgcccgccaatgtggttgcgcgtaaaccgtgtccaccatccgcgcgatagctggctggcactgctggaagaggcgggaatgaaaggttttactcatcctgcttaccctgacgctgtgcgcatggaaacaccggtgccggtccacgcattgccggggtttgaagagggttgggttacggttcaggatgcctccgctcagggctgcatcacatttcttgatccaaaaaacggcgagcaaattctggatctgtgcgcggcaccggggggtaaaaccacacatattctcgaagcggcgcccgaagcacaggtgctggccgtcgatgttgatgagcagcgactctcccgcgtctatgacaacctgaagcgtctgggcatgaaggccaccgttaaacaaggtgatggccgttatccagcccaatggtgtggagagcagcagttcgatcgtattctgctggacgccccctgttccgccaccggcgtcattcgccgtcatccggatatcaagtggctgcgccgggatcgtgatatcgcggaactggcccagctgcagtctgaaattctggatgccgtatggccgcatttgaaaaccggcgggactctggtttacgcaacgtgttcggtattgccggaagagaacagccagcaaattaaagccttcctgcagcgtactgcggatgcggttctcagcgaaaccggcagcgcagatttgccgggccagcaaaatttgccaggtgctgaagaaggtgacggcttcttttacgctaagctaatcaaaaagtaatgagataacgagtcgcgactgatgaaaattatcatattgggcgcagggcaggtcggcggaactctggcagaaaaccttgtcggagagaacaacgatattacgctggtagacacgaatggcgaccgccttcgcagtcttcaggacaaatttgatctcagagtggttcagggccacggctcgcatccacgcgtgctgcgtgaggcgggtgcggatgacgccgatatgctggtcgcagtgaccagctcagatgaaacgaatatggtggcctgccaggtcgcctattcgctgtttaatacgccaaaccgtattgctcgcatccgctccccggattatgtgcgtgatgccgataaacttttccactcagaagcggttcctattgaccacctcatcgcgccagagcagctggtcattgacagcattcaccgcctgattgagtatccaggcgcgctgcaggttgtcaattttgccgaaggaaaagtaagcctcgcagtcgttaaagcctattatggcggtcctttagtgggaaacgcactttcaactatgcgcgaacatatgccgcatattgacacacgcgtagccgctatcttccgccacgatcgccccatcaggccacaaggttcaaccattgttgaagccggtgatgaagtgtttttcatcgccgcttcgcagcatattcgcgccgtcatgagcgaacttcagcgcctcgaaaagccgtataagcgcatcatgctggttggcggcggaaacattggcgccgggctcgctcataagctggagaaagattacagcgtcaaactgattgaacgtaatcagcagcgtgccgcagagcttgcggaaaagctgcaaaatacgatcgtcttctacggcgatgcttcagatcaagaattgctggctgaggaacatatcgatcaagtcgatcttttcattgccgtcaccaacgatgacgaagccaatattatgtcagccatgctggcaaagcgcatgggggccaaaaaggtgatggtactgatccagcgccgtgcctacgtcgatcttgtccaggggagcgtgatcgacattgcaatatcaccgcagcaggcaaccatctctgcgttgctcagccatgtgcgtaaagccgatattgtcggcgtttcctccctacgccgcggtgtcgcagaggctattgaagctgtcgcgcacggagatgaaagtacttcacgggtggttggacgcgctatcgatgagattaagcttccccccggaacaattattggcgccgttgtacgcggtaatgatgtcatgatagcgaataacaatctgcgtattgagcaaggggatcatgtcgttatgttcttgactgacaaaaaattcatctcagacgtcgaaagactattccagccaagtcctttctttttgtagttcgcaggcgtcgacaagacgcctttcttttatcccttgtatatcaaaggataatatttttctgcaattatttcgtggtaatggaaaatagtaatacatttgttaaacttatcagtgtcagctggctcaaggagaataaaatgagttttttaaaagaatttcgcgaatttgcgatgcgcgggaatgtggttgatttggcagtcggtgtcatcattggcgcagcatttggtaaaatcgtatcgtcgttagttgccgatattattatgccgccgctaggcttactcattggcggaatcgactttaaacagtttgccgtgacgctacgggatgcccagggtgacatcccggcggtcgtcatgcattacggcgtattcattcagaacgtgttcgattttattatcgtggcgtttgctatttttatggcaatcaaactgatgaataaactgaacaggaaaaaggaagaggccccggcagcaccaccggcgccaaccaaagaagaagtcctgcttagcgaaattcgtgacctgcttaaagaacaaaacaatcgttcttaagaagccttaaaagcagaaggccagtggtaaaaaagtcatttactttcttgccactggcctcccgaccattctgtcctgcatgtttttcttttctttgatagctgcctttccctttcttgttcttttcaactcgctgcctgaataacgggtcatgaagtagtgcctcaagggcgttatcttttatttgccctttagtatgctgatagcggctcataagctctccagatatgtaaaagaaatcggcgtgagtgtagacgcgtctgatgaaaaaatcaacgtgctggattatgactgctggcgccctgctccagtgcttcaagaattgagcaatagacgctgctgtgcgctgtgccgcagcatgcatcattgaggcgctgcaaagaacgacgcatggcttgtaactctttaatccgggattccacttcacttaaacgagcctgcacaatgcctttagattcctgacaggtatgatgttccggatcgatgcggatcgagagaagttcgcggatcgattccagcgtaaaaccaagctgcctggcatagcgaataaaacgcagcctctgtagatcgttatccgaatagagacgaaagccaccttcagtgcgtacgttatgatccatcatctgctgtttttcataatagcggatggtatcgggagtaacgtcagctaatttagccagttcacctatgcggtacataattactcctcattaatcttttgcagcaacttatcagcgtaatccccacgcagaaagtcagtgttcaagcccgcctgccgcagctttaactcaagcagcgccagacgacggctcagctcagcatagcggggatcgctctcctgaacgcctttaagtaagtcattgagcatcacggcttctttacgatgttcaagttcgggaggtaaacaacccgaattcttgagtaatcgatagcctgcgcgtagctcaggcggcacatgcgagtcatcgtccagagtcagtggctccccacttcccggcaggttatcaaactcacctttgtgctgtgcatcaagaatatggcgttctgcccactgatccagtaaccacatcataaggctccggggatgaacaaaaataatgcagatattgtaaacaagcaggaatagggtggatataaaaaaacccgccggagcgggtttttttacgttactacagattactctgcagcagcttctgctttcgattcagagcgatcaaccagctcgatgtatgccatcggcgcgttgtcgcctgcacggaagccacacttcagaatacgagtgtaaccaccggcgcggctcgcgaaacgcgggcccagctcgttaaacagttttgccacgatctcgttatcacgagtacgggcgaatgccagacgacgattagcaacgctatcagtcttggcaagagtaatcagcggctcaactacgcgacgcagttctttcgctttcggcagggtcgtcttgatgatttcatgacgaaccagcgaaccagccatgttacggaacatagcctggcgatggctgctgttgcggttcagttgacgaccactcttacgatggcgcatgaccttatccttctcagtaaaaccttaacctgtgatccggttactcgtcagcaatgcttgccggtggccagttttccaggcgcatgcccagagacaaaccacgtgaagccagcacgtctttaatctcagtaagagattttttacccaggttcggcgttttcagcaactcaacctcggtacgctgtaccagatcaccgatatagtggatagcttctgccttaaggcagttagcagagcggacagtcaattcgagatcgtcaacagggcgcagcaggatcggatcgaattctggtttctcttctttcacttccggctgacgtacatcacgtaaatcaacgaaagcttccagttgttctgccaggatggttgccgcacgacgaatcgcctcttcaggatcgattgtgccgttggtttccatttcgatgaccagcttgtccaggtcggtacgctgttctacacgcgctgcttcaacattgtaggcaatacgctctacagggctgtagcatgcgtcgaccagcagacggccgattgggcgctcatcttcttccgaatgaattcgggcagaagccggcacataaccgcgaccgcgctgaactttgatacgcatgctaatagctgcgttctcatcggtcaggtggcagatcacatgttgcggcttgacgatttcgacatcaccgtcatgggtaatgtcggctgcggtcacagggccaatgccagatttgttcaaagtaaggataacttcatctttaccctgaactctcaccgccagccctttcaggttgagcaggatttcaaggatatcttcctgaacgccttctttggtgctgtactcatgaagtacaccatcaatctcaacctcggtcaccgcgcaacccggcatcgatgagagcagaatacggcgcagtgcgttaccaagagtatggccaaagccacgctctaaaggttcaagggtcaccttggcgtgcgtcgaactcacttgctcgatatcgaccaggcgcggttttagaaactctgtcacagaaccctgcattgtgtcctctctttggtactaagctttacttggagtaaagctcgacgatcaggtgttcgttaatgtccgcagacagatcagaacgttccggctgacgcttgaacgtaccttccatcttgccagcatcaacttccagccaggttggcttttcacgctgctcagccagctccagagcggctttcacgcgagattgctttttcgctttctcacgaatgctgacaacgtcattcgctttaacctgataagaagcgatgttaacaacacgaccgtttaccatgatagctttgtggctaaccagctgacgtgattcagcacgagtcgcgccgaagcccatacggtatacaacgttgtccagacgaccttccagcagagtcaacaggttttcaccggtgttgcctttcagacgcgctgcttctttatagtagttacggaactgacgctccagcacaccgtacatacggcgaactttttgcttttcacgcaactgcacaccatagtcagacagacgcggtttacgcgcaccgtgctggccaggagcttgttcaattttacacttggtatcgatcgcgcgaacgccagacttaaggaacaggtctgtgccctcacgacggctcagcttgagcttaggacccaaatatcttgccattttctttctccaacaatcctagaaacgaacgcgttatacgcgacgttttttcggcggacgacaaccgttatgagggatcggagtcacatcagtaatattagtgatgcggaaaccagcggcgttcagtgcacgaatagtagattcgcgacctggacccggacctttgaccataacttccagattcttgatgccgtattcttttacggcttcagcgcaacgctctgctgcaacctgagctgcaaacggagtggatttgcgagaaccacggaaaccggaaccaccggctgttgcccaacccagcgcgttaccctgacgatcggtaatggtaacgatggtgttgttaaaagaagcatggacatgagccacgccatcagagacttgttttcttacacgcttacgtgcacgaactggtgcctttgccattattcaatcaccccgactatttcttgatcggtttacgcggacccttacgggtacgtgcgttggtcttagtacgctgaccgcgaaccggaagaccacgacgatggcgtaaaccacgatagcaaccaaggtccatcagacgcttgatgctcagggtgatttcacggcgcagatcaccttcaacgacaaatttaccaaccgcttcacgcagggattcaatttgttcttcagacagctcactgatcttaacattttcagcgatacccgtgtcagcacagatggctttagagcgggtcttgccgataccgaaaatagcagttaatgcgattacggtatgtttgtgatcaggaatgttaatgcctgctatacgggccactatgcactcctactatttaatatgtacgcaccatgctgaaaagcccgttttcaggatactcaaatggaaacgtacagacatacaaaagattggctggctaatctagccagctcaacccaactttgcaagaaaaatatgcgaataaatcagccttggcgctgtttatgcttcggctcggcactgcaaatcacgcggatgacgccatcacgcttaacgattttgcagttacggcataatttcttgacggaagcacgaactttcatttttactctccgtaacttctcgagcgacctgttagcggccgtagcctttcaggttcgccttcttcaatgcagactcgtactgactcgacatcatcagagtttgcacttgagccataaagtccataatcacgacaacaacgataagcagtgaggttccaccgaagtagaacggtactttcattgcatcacgcatgaactccgggatcaggcagataaaagtgatgtataacgcaccgaccaaagtcaggcgagtcattactttatcgatatacttcgccgtttgctctcccggacgaattcctggtacaaatgcaccggacttcttcaggttatctgctgtttcacgcgggttgaaaaccaacgccgtgtagaagaaacagaagaagatgattgcagacgcatagagtaacacataaagcggttgcccaggctgcaaatacagcgaaattgttgtcagccagttccaaccagtaccgcccccgaaccatgatgtaatggtagccgggaacagaataatactggaagcgaagattgccgggataacccctgccatattcactttcagcggtaaatgtgtgctctgtgcagcatagacacgacgaccctgttgacgtttagcgtagtttaccacaatgcggcgttgaccacgctctacaaagacaacaaagaaggtcactgcaaatactaatactgcaaccaacagcaacaggaggaagtgcaggtcgccttgacgcgcttgctcgatagtatgggcgatggccggcgggagacccgcaacgataccggcgaagataatgattgagataccgtttccgataccgcgctcagtaatctgttcgccgagccacatcaggaacatcgttcctgagaccagactaacaacagcggtgaaatagaatgcaaagcctggattaatcaccaggccctgcataccaggcatattcggcagaccggtagcaataccgatcgactggaatatcgccagcaccagagtaccgtagcgggtgtactggctgatcttacgacgaccagactccccttctttcttcagctccgctaacggctgataaacaaccgtcagcagctggacaatgatcgatgccgaaatatacggcatgatacccaacgcaaagatagaagcacggctgagagcaccaccagagaacatgttgaacatttcaatgatggtgcctcgctgttgctcaagcagtttggcaagtacagcggcatcaataccagggatcggaataaaagagccaatacggaacacaatcaacgcaccgattacaaacaacagtctgcgcttcagttcgccaatcccacctttggcactttgaaaatctaatcccggttgcttagccatctgctacttattcctcaattttaccgccagcagcttcgatagcagcacgagcacctttagtcacgcgcaggccacgaacagttaccggacgagatacttcaccagacaggatcactttcgcgaactcgatctggataccgataatgttagccgctttcagcgtgttcaggtcgataacatcgccttctacgtgagccagatcagacagacgaacttctgcagtgatcatcgctttacgagaagtgaagccgaatttcggcagacgacggtatagaggcatctgaccaccttcgaaaccgcgacgtacgccaccaccagaacgagagttctgacctttgtgaccacgaccaccggttttaccgaggccagaaccgataccacgacccaggcgtttacccgcctttttggagccttcggccggagacagagtatttaaacgcatctcttactcctcaactttaaccatgaaggaaaccgcgttgaccataccacgaacagcaggagtatcctcgcgctctacggtgtgaccaatacgacgcagacccaggccaagcagcgttgccttgtgtttcggcagacgaccgattgcactgcgggtttgagtaattttaatagtctttgccatggtttatttccccagaatttcttcaacggatttaccacgcttggcagcgaccatttctggagaattcatattttccaggccatcaatagttgcacgaaccacgttgatcgggttggtggaaccatatgctttggccagaacgttatgaactccagcaacttccagaacggcgcgcattgcaccaccggcgatgataccggtaccttcggaagctggctgcatgaatacacgagaacccgtgtgaacacctttaaccgggtgctgcagggtgccgtggttcagcgcgacgttaatcatattgcgacgggctttttccatcgctttctggatcgctgctggaacttcacgcgctttaccgtaaccaaaaccaacgcgaccgttaccgtcacctactacagtcagagctgtgaaggagaaaatacgaccacctttaacggttttagatacgcggttaaccgcgatcagcttttcctgcagttcgccagcttgtttttcgatgtgagccatcttacacctctaccttagaactgaaggccagcttcacgggcagcatctgccagtgcctggacacgaccatgatattggaacccggaacggtcaaaggaaacatctttgatgcctttttccagagcgcgttcagcaacagctttacccacagctgctgccgcgtctttgttaccggtgtacttcagttgttcagcgatagctttttctacagtagaagcagctaccagaacttcagaaccgttcggtgcaattacctgtgcgtaaatatgacgcggggtacgatgtaccaccaggcgagttgcacccagctcctggagcttgcggcgtgcgcgggtcgcacgacggatacgagcagatttcttatccatagtgttaccttacttcttcttagcctctttggtacgcacgacttcgtcggcgtaacgaacacccttacctttataaggctcaggacgacggtaggcgcgcagatctgctgcaacctggccgatcacctgcttatcagcgcctttcagcacgatttcagtttgagtcggacattctgcagtgataccggccggcagtttatgctcaacaggatgagagaaacctaaagccaggtttactacatcccctttgaccgctgcacgatagcctacaccaaccagctgaagctttttagtgaagccttcggtaacaccaacaaccattgagttcagcagggcacgcgcggtaccagcctgagcccatccatccacgaaaccatcacgcggaccgaaggtcagagcattatctgcatgtttaacttcaacagcattgttgagggtacgagtcagctcgccgtttttacctttgatcgtaataacctgaccgttgatttttacatcaacgccggcaggaacaacgaccggtgctttagcaacacgagacattttttcctccgattaggctacgtagcagataatttcgccaccaagaccagcctggcgcgctgcacgatcggtcataacacctttagaggtagaaataaccgcgatacccagacccgccataactttcggcagctcatctttacgtttgtagatgcgcagacctgggcggctgacacgctgaatgctttctacaacagctttaccctggaaatacttaagagtcagttccagttccggcttgatgtcgccttcaactttaaaatcttcaataaagccttcttccttcagcacgttggcaattgccactttcagcttggaggaaggcatggtgaccgcagctttattcgcggcctgaccgttacggatacgggtcagcatatccgcgatcggatcttgcatgctcatctgtctttactcccgtgattcaattggtgacaattaccagctagcctttttcagacccgggatttcaccgcgcattgcggcttcacggaccttgatacggctcaacccgaacttccgcaggaaaccatgcggacgacctgtttgacggcagcgattacgctgacgagacgggctggaatcacgcggcagagtctgcagcttgagaacagcattccaacgatcttcgtcggttgcgttcacatcagagatgatagctttcagttcagcgcgtttagcgaagaatttatcagctaaagccacgcgctttacttcgcgtgctttcattgattgcttagccattaagtaaccctaccttacttgcggaacgggaagtcaaaggcagccagcagagcgcggccttcttcatcagatttcgcagtagtggtaatggtaatatccaaaccacgaacgcggtcgactttatcgtagtcgatttctgggaagatgatctgctcacggacacccatgctgtagttgccacgaccgtcgaaagacttagcggacaagccacggaagtcacggatacgcggtacagcaatagtgatcaggcgctcaaagaactcccacatgcgttcgccacgcagagttactttacagccgatcggatagccctgacggattttgaagcctgcaactgatttgcgtgctttggtgatcagcggtttttgaccggagattgctgtcagatcggctgctgcgttatccagcagtttcttgtcagcgatcgcttcaccaacacccatgttcagggtgatcttctcgacccgagggacttgcatgacagaattgtagttaaactcagtcatgagttttttaactacttcgtctttgtagtaatcatgcagtttcgccatcgtactactccaaattacttgatagtttcgctgttagatttgaagaaacggacttttttgccgtcttcgaatctaaagcctacacggtcagccttgccggttgccgcattgaagattgcaacgttagaaacctgaatagcagcttctttttcaacgatgccgcctggttggttcagagccggaaccggcttctggtgtttcttaaccaggttgataccttcaacaatgagcttgccggaagacaagacattcttaactttaccgcgtttacctttatctttaccggttaacacgataacttcgtcatcacgacggattttcgctgccatgattcgctccttagagtacttctggggccagagagataattttcatgaacttctcgttacgaagttcacgagttaccggcccaaaaatacgcgtaccgatgggctgctcgctgttattgtttaaaataacgcatgcattaccatcgaagcgaatgacagaaccgtccgggcgacgaacacccttcttggtgcgcaccactaccgccttcagcacatcaccttttttgaccttaccacgcggaattgcttctttgatggtgatcttgatgatgtcgcctacgcctgcgtagcgacggtgcgagccacccagaaccttgatacacattacgcgacgtgcaccggagttgtcggcgacgttcagcatagtctgttcttggatcattttagtgctccgctaatgtcaactactactgagacccaaaaatagggtcgttaaaaaagccccatatcgagggcgcggcattataacaccgcaaatcagatatgggtagaaaaaataaacggctcatcgctgagccgtttatccgtatcgagaatgcgtactctattacagaaccgctttctctacaacgcgaaccagcgtccaggacttagtcttggacagcggacggcattcgcggatttcaaccacgtcgccgataccgcattcgttgttctcgtcatgtacgtgcagtttggtcgtacgcttgatgaatttgccgtataccgggtgtttcaccatacgttcgatagcaacaacaatggatttctccattttgtcgctaaccacgcgaccttgcagagtacggattttatcggtcattacgcacccgccttctgagtcagtaaagtcttaacgcgtgcaacatcacgacgcacttgcttcagcagatgagtctgttgcagctggccacttgcagcctgcatacgcaggttgaactgctcacgcagcaggttcagcagctcagcgttcagctcttcaacgcttttttcacgcagctcttttgctttcattacatcaccgtcttagttacaaaggtggttttgatcggcagtttcgctgctgccaggccgaatgcttcacgggccagctcttccggtacgccgtccatttcataaaggactttacccggctgaatcaaggcaacccagtactccacgttacctttacctttacccatacgaacttccagcggcttctcggtgatcggtttgtccgggaatacacggatccagatcttaccttgacgcttaactgcacgggtcatagcacgacgtgctgcttcgatctgacgtgcagtcagacgaccacggccaacagctttcagaccgaaagtgccgaagctaacatccgtaccctgcgccagaccacggttgcggcctttgtgcactttacggaattttgtacgctttggttgtaacatcagcgacgctccttatttacggcctttacgctgctgctttttaggttgagcagccggttccggttgttcaacagcagccataccacccaggatctcacctttgaagatccataccttaacgccgattacaccgtaagtggtgtgcgcttcagaggtgttgtagtcgatgtcagcacgcagagtgtgcagcggtacgcgaccttcacggtaccattcggtacgtgcgatttccgcgccgcccagacggccgctaacttcaactttgatacctttagcgcccagacgcattgcgttctgtacagcacgcttcatagcacgacggaacataacgcgacgttccagctgagaagtgatgctgtcagcaaccaatttagcgtccagttcaggcttacgaacttcggcaatattgatctgtgcaggcacgccagcgagatccgcgacgaccttgcgcagtttttctacgtcttcgcctttcttaccgataacgatacccgggcgagcagtgtgaatggtcacacggatgcttttagccggacgctcgataacgatgcgagatacagacgctttcgccagttccttagtcaggtactgacgtactttaaaatcgctgtccaggttgtcagcgaattctttggtgttcgcaaaccaggttgagttccatggttttacaatacccaggcgaataccattaggatgtactttctgacccattgctagtctccagagtctcagcgatcggacacaaccacagtaatgtggctggtgcgcttcaggatgcgatctgcacgacctttagcacgcggcataatgcgcttcatgctcgggccttcgtctacgaaaattttcgcaactttcagatcatcaatgtcagcgccatcgttgtgttcagcgttagcaatggcagattccagtaccttcttgaccagtacagcagctttcttattggtgtaggtcagaatatccagggcctgcgacactttcttaccgcgaatcaggtcagcaacaaggcgaaccttctgagcagaagaacgagcatggcgatgttgagctaaagtttccatctcttcctcctaccttatttcttcttcgcttttttatcagcagcgtggccgcgataagtacgagtcggtgcgaattcacccagtttgtgaccaaccatttcgtcggaaacaaaaactggaacgtgctgacgaccattatggacagcgatggtcaaaccgatcatgttaggaaagatcgttgaacgacgggaccaagtgcgcaggggcttcttgtctccgctttccaccgctttctctaccttcttcagcaagtgcaggtcaataaaaggacctttcttgagagaacgtggcatggcttatcctctaaaattatttgctacggcgacgtacgatgaatttatcagtacgcttgttgctgcgggtcttcttacctttggtctgaacgccccacggagttaccgggtgcttaccaaagttacgaccttcaccaccaccatgtgggtggtcgactgggttcatcgcagtaccgcgaacggtaggacgaacaccacgccagcgtgcagcacctgctttacccagaacgcgcagcatatgctcagcattgccaacttcgcccagagtagcgcggcagtctgcttcgactttacgcatttcaccagaacgcagacgcagggtgacataagcaccatcgcgagcaacgatctgaacgtaagtaccagcggaacgagccagctgaccgcctttacctggtttcatttctacgttatgaacggtagaaccaaccgggatattgcgcatcggcagggtgttgcctgctttgattgcagcatcaacgccagattgaatctggtcgccagctttcaggcctttaggggccagaatgtaacggcgctcaccgtctttgtacagaaccagcgcgatgttcgcggagcggttcggatcgtactcaagacgttcaacaactgccgggataccatctttgttgcgtttgaagtcaacaatacggtaggcctgtttgtgaccaccaccgatatgacgggtggtgatacggccattgttgttacgaccaccggatttgctgtttttttcaaccagcggagcaaaaggtttgcccttgtgcagctctgggttgaccactttaacaacgtggcgacgacccggagatgtcggtttacatttaacaactgccattgtattactcctccgacttactcagcgccgccgacgaagtccagattctggccttccttcagggtgacgtaagcttttttccagtcgctacgacgaccgatacgctgtccgtgacgtttaactttccctttaacaaccagggtgttaacgacttcgacttcgacttcaaacagtttctgcacagcagctttgatctctgctttggtcgcgtctttagcaactttgagaacgatggtgttagttttttccatcgcagtagacgctttttcagaaacgtgcggtgcgcgcagcaccttcagcagacgttcttcacgaatcatgccagcatctcctcaacttgcttaacagcatcagcagtcattacgactttgtcgaaggcgatcaggctaaccgggtcgataccagttgcatcacgtacgtcaaccttgtgcaggttgcgcgcagcaaggaacaggttctcgtccagctcaccggtgatgatcagcacatcttccagagccatgtctttcagtttctgtgccagcagcttagttttaggcgcttctacagagaaagattcgacaacgatcagacgatcctgacgtaccagttcggacagaatgcttttcagcgcgccgcggtacatctttttgttaactttttgactgtggtcctgcggacgcgcagcgaaggtcacgccacctgaacgccagatcgggctcttgatagaacctgaacgcgcacggccggtacctttctggcgccacggctttttgcctgaaccagttacttcagcacgagtcttctgagcacgagtaccctgacgagcaccagctgcataagcaactacaacctggtgaaccagcgcttcgttgaaatcacgaccgaaggtagtttcggaaacagtcagcgcgctctgcgcgtctttcaatactaattccattgctatccccttacgccttcacagctggtttaacgatcaggtcgctaccggttgcacccgggaccgcgcctttaaccagcagcaggttgcgctcagcgtcaacacgtactacgtccaggctctgaacggtgacacgttcgttacccagctgacctgccattttcttgcctttgaacactttgcccggagtctggttctgaccgatagaacccggaacgcggtgagacaaggagttaccgtgagtagcgtcctgggtacggaagttccagcgcttaacggtaccagcaaaacctttacctttagaggtaccggttacgtcaacttttttaacgtcagcaaacagctcaacgctaatgtcctgacctacggtgaactcttcgccgtcagccagacggaattcccacagaccacggccagcttctacgccagctttagcgaagtgacccgcttccggtttggttacacggttagcttttttagcaccagtggtcacctgaacggcacggtagccatcgttagccagatctttaacctgagtaacgcggtttgcttcaacttcgattacggttactgggatagatacgccatcttcagtgaagatgcgggtcatgcccacttttttaccgactaaaccaatcattgtttcaacctctcaatcgctcgatgacctgattaacccaggctgatctgcacgtctacaccggcagccagatccagacgcatcagagcatcaacggttttttcagttggctcaacgatgtcaaccagacgcttatgagtgcggatttcgtactgatcgcgcgcgtctttgttaacgtgcggagagatcagaacggtaaagcgctctttgcgggtcggcagcgggatcggaccacggacttgcgcaccagtgcgcttagcagtctcgacgatttccgcggttgattgatcgatcagacgatgatcaaacgctttaaggcggatacggattctttggttctgcatgagaccagagctccaattattttatagacgaaatggttactcctcatacccattacgattgatgggagagtgtaaccgttcttacatagttccccaattgggaacattgtttggtagcgtgtcgctgctaccagggttcatatcgaaccggccgtcaactttgacaggcccgcgcattatacgcaaattcagcgacaacgcaagggatgcgtacaaaatcatcacttgtttctgcgagctcacttccaggcccctcgcaatgccatgaaaggccggcaaatactctggagcgggacatccattcctgtttattgccttttgccagaggcttggctcctgcatcacactcagtacccagggccaccacatggaaaccatcgatgatagcgactttggcattctttattatttatggcgggttattactcacgctttgttggcacgatctgcgctatggcttgctacccgataaatttacctgccctctgctgtggggcgggttgctttattatctgtgtatgtcaccagccaatctgcagcatgcagtctggggagcgatagcaggctatctggcctttgcgttgatctattggctctacaggggaatacgcgggcgtgaaggcatcggctacggcgatgtcaaatttctcgccgcactaggggcatggcagggatggagagttttaccgcagctcgttcttatagcaacaattctcgcctgcgctgccgtaacggttctgattctgtgcggcaaacacaggcaggcattacgcaacccgctgcctttcggccctttcctggccacagcgggtttgctatgtggttggcaaactttttttagtcagccactttaatctgcgactgaagataattctgcagaccaattttacctatcaaatccagctcggtttccagccagtcgatatggccttcttcgtcggcgaggatggtgattaacatatcacggctgacgtagtcgtggacgctgtcagcataggcaatggcttctcgtagatcctttgccccttccagttccagcctcaggtcggattgcagcatctcctccacatcctctccgatgcggagtttgccgagatcctgcaggttcgggatcccttcgagaaataaaatgcgctcgatatacttatcggcatgcttcatttcatcgatagattcgtggtactcgacatcattgaggcgcatcaggccccagttcttgaacattctcgcatggagaaagtattgattaattgcgactagctcatttcccaataatttattgagataacttatgattttgacatcacctttcattatataatccctccgcttccacttattgaagcgtagttcgggctatagggatgtcaaagtaaagctgagaggcttcaggcgatctcttgatattccggcatgcgggttaattcatcttccataatttctcgtgctgcacgaacgcacttaccacattgatttccaacgggaataaattttctcagctgctgaaaagactgaggattgaattggcgcacagcctgacgaatttttttatcgttcacaccattacacagacaaacgtacatatatactcccgttcaacttacagacaaagtgtaaatgagaatagttatgattacaatagcctgtttattaaataggcgtttgatctctttgctgtcagtcagtgtgctgcttcacgcaaatagcagacagcaaaaagggcgccttagcgccctttttaattcagaactaaatattagcccagaactttagcaacaacgcccgcgccaacggtacggccgccttcacggattgcgaaacgcagaccgtcgtccatcgcgatcgggtggatcagggtaacaaccattttgatgttgtcgcccggcattaccatctctacgccttccggcagttcgatggtgccagtcacgtcagttgtacggaagtagaactgcggacggtagcctttgaagaacggagtatgacggccgccttcgtctttggacagaatgtacacttcagattcgaacttggtgtgcggcttgatagaacccggcttagccagtacctgaccacgttcgatttcttcacgtttgataccacgcagcagaacaccaacgttctcaccagcacggccttcgtccagcagtttgcggaacatttcaacgccagtacaggtagacttcgcagtctctttgataccaacgatttcaacttcttcgccaactttgatgataccgcgctctacacgaccggtaacaacggtaccacgaccggagatggagaatacgtcttcgatcggcagcaggaacggcttgtcaatcgcacgctctggttccgggatgtaagaatccaggtagccagccagttcgatgattttcgcttcccagtctgcgtcgccttccagcgctttcagagcggaaccgcgaacgatcggagtgtcgtcgcccgggaaatcgtactgagacagaagttcacgaacttccatttcaaccagttccagcagctcttcgtcatcaaccatgtcgcatttgttcaggaacacgatgatgtacggaacgcctacctgacgacccagcaggatgtgctcacgagtctgcggcatcgggccgtcagtcgcagcaacaaccaggatcgcgccgtccatctgcgcagcaccggtgatcatgtttttaacatagtcggcgtggcccgggcagtctacgtgcgcgtagtggcgagtcggggtgtcatattcaacgtgagaagtgttgatggtgataccacgagctttttcttccggcgcgttatcgatctggtcgaatgcgcgagcagaaccaccgtaggttttagccagaacggtagtgattgcagcggtcagagtagttttaccatggtcaacgtggccgatagtaccgacgttgacgtgcggttttgtacgttcaaatttttctttagacacggctatattccttactatagtgctctccccttctggagagagcacgggactttggttttaaccctgcggcttatttaccacgggcttcgattacggcctgagcaacgttgttcggcgcatcatcatacttcaggaactccatggagtaagaagcacgacctttggtcagagaacgcagctgagttgcatatccgaacatttcagacagcggaacttcagcgtggatcacaacgccagtcacgttggattcctgaccgcgcagcataccgcgacgacggctaaggtcaccgataacgtcaccagtgttctcttccggagtttctacttcaaccttcatgatcggctcaagcagaactggtttcgctttcttaaagccatctttaaaggcaatagaagcggccagtttaaacgccagttcagaggagtcaacgtcgtggtaagaaccgaagtgcagacgcacgcccagatcaactaccggataaccagccagaggacctgctttcagctgctcctggatgcctttatcaacggccgggatgtattcgccaggaattacaccacctttgatgtcgttgatgaactcataacctttcgggttagagcccggctccagtgggtacatgtcgataacgacgtgaccgtactgaccgcgaccaccagactgtttagcgtgtttaccttcgatatcggtaactttcgcacgaatcgcttcgcggtaagcaacctgaggtttaccgacgttcgcttcaacgttgaattcacgcttcatacggtcgacgatgatgtcgaggtgcagctcacccataccggcgatgatggtctggttagattcttcgtcagtccatacgcggaaagacgggtcttctttagccagacggcccagagccagacccattttttcctggtcagctttggttttcggttcaacagcgatagagattaccggctcagggaattccatacgctccagaatgatcggcgcattaggatcgcacagagtgtcacccgtagttacgtctttcagaccgatagcagcagcgatatcgcccgcgcgaacttctttgatctcttcacgtttgttagcgtgcatctgtacgatacgaccgaaacgctcacgtgcagctttcacggagttcaggatggtatcaccagagttaaccacaccagagtatacgcggaagaaggtcaggttacccacgaacgggtcggtagcgattttgaatgccagagcagcaaacggctcatcatcgctagcgtgacgctcagccggagtatctttaccatcgtccaggataccgttgatcgcaggtacgtcaaccggggatggcaggtagtcaactaccgcatccagcatcgcctgaacacctttgttcttgaacgcagaaccacaggttaccaggatgatttcgttgttcagaacgcgctgacggagagcagttttaatctcttcttcagtcagttcttcaccacccaggtatttctccatcagctcttcagaagcttcagcagcggactcgatcaggttctggtgccattcttcggccagttcctgcatgtctgccgggatatcttcgtaagtgaaggttacacctgcgtcttcttcgttccagttgatggctttcattttcaccaggtcaacaacaccggtgaacgcttcttcagcgccaatcgccagctgcagcggaacagggttcgcgcccagacgggttttgatctgaccaacaactttcaggaagttcgcacccatacggtccattttgttaacgaacgcaatgcgcggaactttgtatttgtttgcctgacgccatacggtttcagactgaggctgaacaccaccaactgcgcagtaaaccattactgcaccatcaagcacacgcatggaacgttctacttcgatggtgaagtcaacgtgccccggggtgtcgatgatgtttacgcgatgcggttcatactgcttagccatacctgaccagaatgcagtagtcgctgcggaggtgatagtaataccacgctcctgctcctgttccatccagtccatggtggcagcgccgtcatgaacttcaccgattttgtggtttacaccggtgtagaacagaatacgttcggtagtagtagttttaccggcgtcgatgtgcgcactgataccgatgttacggtagcgtgcgatgggtgttgtacgagccatttgattcctcgtttatttctttaggcgttcagttaagttatccaaaacgggcgacttatctgaagcgcccgcctggtgactaatactccgaagggattaccaacggtagtgtgcgaacgccttgttggcttctgccatacggtgaacgtcttcacgtttcttaactgcagtacctttgttgtctgcagcatcagaaagttcgttcgccagacgcagagccatggatttatcaccacgtttacgagcagcttcaacgatccaacgcattgccagagcattacgacgaaccggacggacttcaactggaacctgataagtagaaccaccaacgcggcgagacttaacttctacagtcgggcgcacgttgtcgagagcgacttcgaaagcttccagttcatttttaccagagcgctgagccagggtctccagcgcgctgtatacgattgcttctgcagtagattttttaccatctaccatcaggatatttacaaatttagccagcagttctgatccgaacttaggatccggcaggattttacgctgaccaatgacgcgacgacgtggcatggaaatactccgttgttaattcaggattgtccaaaactctaagagtttagtttgacattaatataaaacgtttggccttacttaacggagaaccattaagccttaggacgcttcacgccatacttggagcgagcttgcttacggtctttaacgccggagcagtcaagcgcaccacgaacggtgtggtaacgaacacccggaaggtctttaacacgaccgccacggatcaggatcacggagtgctcctgcaggttgtgaccttcaccaccgatgtaggaggtgacttcgaaaccgttagtcagacgcacacggcaaactttacgcagtgcggagttcggtttcttaggagtggtggtatatacacgagtacatacgccacgtttctgcgggcaggcttccagcgccggcacgttgctctttgcaactttgcgcgcgcgtggtttgcgtaccagctggttaattgttgccattaaatagctcctggttttagcttttgcttcgtaaacacgtaataaatcgcctcatataatatgaggacgcagaattttagggcggtgccgaaaaggtgtcaagaaatatacaacgatcccgccattaccaggacaactgacctgcatgtttgactgaaagtctgacgaaatcagtatagctaaccctgacgacactgtccgcaatttgaccagccagcccgcgggcttcgatatcttcttgcagagcgtagagggatatgggggcagattgcaggatttcaaggaaacggccttccgcgagagcggcgataacgccgtccgacagcagcagaagatcgtcgccctcttttagcaaacggagcatagccgccatatcggcgtgccagggagatgtgcttagcgtgtggagcattcgagcctcagaaccgcagtatcacgttaaaatcgtcaagccgggcgcgcaaagcctctggctccagccattcgccatcaacaacccacggcgtggcagaattcagaccgcgctcccgtgctgaagcagcgcaaatccagcactgttcgatatcgtatagcgataagagcttaaaggtggagatatagtcgcgcgccagcaccgctgcggggcgctgcccgggaagaagctgaaagacgccatcgcccacgaagaaaacgccgatctcttccgtcagcgcggaggttgccagcagggcgtccagcccttccctgcccgacgctgaaccatgaggcgcagacgaaaaaacaaaggctacgcgcttcatcagaactgcaccatgcgatcgcaggttaacgcggcttccgccagcgcgcccaatccgctcaaggtaaagcccggctgcaaattatacccaggcaaattcagctgccgggcttcctgttcatcagtgattccacggcgtaacgctgcggctacacagatatgcaaggaaacggcgtgttcgtcatgcagcgtctgccaggcccgaaccagatcaaattcgtcgctggcgggcgccgtgagctgattcgcgttatagacgccttcacgatagaaaaagacgctgagcaactcgtggccttcctgcaaaacggcgcgggcaaactgtagtgcgctgctggcctgctgggtaccataagcgggccctgttaccgtaatggcaaagcgcattacttatccagcccctggaaatctccacttttgaactgacgaatgtagagatataccgtgtgcttagagatattcagccgatcggccacctgattgatggcatctttgatatcaaagatccccttctcatagaggttcaggacgatctgccgatttttagcgttgttagaaacgttacggtcagcgttcacctcttcaatcgtgaactcaagcgtctgggccaccagatcgtcaaccgatgaagcaaagttgacctgggaattcacctccgtcgtttccggcggaataaaggtgctcatgatttgtgagaaagggacatcaaggttcatgttgatgcacagcaggccaatgacccgatggtcacggttgcggatagcgatagtgaccgatttcatcagcacaccgcttttggcgcgagtaaaatagcatttggaaacgctgctatcggctccagtcatatcgtgcagcatgcgcagcgcaaggtcggtaattggcgagccaatttgacggccggtgtgttcaccgttggcgatacgaatagcggaacattttaagtcctgcaatgagtgcaatacgatttcacagtgggaaccgatgagcatcgctaacccgtccactaccgcttcataggatttaaggatatcgaagtcggtctggtcaaaaggacgttgatccagcaaatcaagctcactggtctcgttggttaaaagcgacctggacatgaaaaaaagcactccttttcaggagcctgtcgttatcgtcagggcaggctcatcatcattattaatctatctaaagtaatacagcgcctgaggttctttccagttttaattatatctgcccgcaataaaaaaaccgccgcccctggaggcggcggctcaaaaccgattacttcttagcgtcagcggctggcgcttcagcagcggcttcaggcttggcgtccgctttcggcgccggtttaatatccagcagctctacatcaaataccagagtagagtttgccgggatacccggtacgccagttttgccgtaagccagatccggtggaatgaccagctggattttaccgcctttcttgatgttcttcaggccttcggtccagcccgggatcacgccgtccaggcggaaggaaagcggctcgccgcgggtataagagttatcaaactctttaccgtcgatcagcgtacctttgtagttgacgacaacggtatcgctgtctttcggcgtttcgccggtacccgctttctcgactttgtagagcaggccagatttagacgtttttacgcctttctctttggcaaaggcgtcacggtaagctttgccttttgcttcattctcagaggcgtctttttccattttctgctgagcagcagtttttacacgtgtttcaaacgtctgcagagtctgttcgatctcctgatcggacagtttgctcttatcagcaaaagcgtcctgaacgccggcgatcagctgatctttatctaatttgatgcccagcttttcttgttctttcagggagttttccatgtaacgtcccagcgatgcacccagcgcataagcagatttctgatcgtcatttttaaatgccgatttgctgtccgttgcgggtgccgctttcgctgtagtctcagcagcgaagctcagcggtgcattcagggcgatggccatagtggtcgccagcagcgttactttaaacagtgatttcatccatttctccagggccggggcatctcaccccagggttatcgtaaaaaacaaaaaacgtactatagaacgttgcagaacaaatcaacatacagacgtacctgaatatcgcctcatttaggactatttttgtataaattagtttcctgtcagacgtaacgatgctgcgcggatgctgaaacttcagtagaatccgcccgcaggataagacagaagaggttactcatgcacaatagcactttagagactcgccttgcggagctggagagcagactggcgtttcaggaaatcactattgaagacctcaacaagaccgtcaccgcccacgagatagaaatggcgaggatgcgcgaacatatgcgcctgatggtcgaaaaactgaaagccactcagccttcgcatatggcttcacaggcggaagaaacgcccccgccgcactattaagacgtaaaaaaagcgggtttccccgcttttttctattccgcgacgcgagcgcagcggaattagtggcagccgcagccgccgttgccgccgcagccgcctttgccatgttcgtggtcatggtcatggccgtggccaccgcagcaaccatcatgatcgtggtcgtggccatgatcgtgcccgtgagcaccgtgtacatgaccatgctccagctcttccgccgttgcttcgcgaatcgcgacaacttcaacgttgaacttcagattctgaccagccagcatgtggttaccgtcaacaacaacgtgttcgtcacccacttcggtgatttctaccggtaccggaccctgatcggtttccgccaggaagcgcatgccaacctgcagttcatcaacgcccataaatacgtctttaggaacgcgctgaaccaggttttcgtcgtactgaccgtatgcatcgttagcgccgacttcgacgtcaaatttgtcgccaacgtcgtggccgtccagcgcgttttccaggccggaaatcagggaaccgtgaccatgcaggtagtcaagcggcgcgcttaccggagactcatcaaccaacacaccgtcttctgtacgtacctgataggccaggctgaccaccaggtcttttgctactttcatgatatctcctgagcatgggaagaatagtggcgcagattgtagcggaattctgcacccgtgtaccctctagcttaaaaaaagccgatagataacgctagtccggatgaaaaatgcctatcacttgctcttctttgcgaacatgctcacggacctctttatccgcctcacgcatctgatgaccgcacttaacgcactcaacaatatcgacattattctcacgccacatcgccagcgaatcctgggcctggcacgccgggcatttcgcaccggcgataaaacgtttacgcacagccatatcatttacctttattcaaattcatcccagccgtctaactgcctgctctctttttgcatctcgcgctgaaaaatctcctccagctcgcgtctggcttcccgcacgcgggatatctgcagggtatcactatgcaccggcattaactcacgcagcatccgcatatcgaggcgccgaaaatgcagctgggcgcgctgcgcctgatggggatgcatgccgagcgagataagcgcttttcgtcctagctccagcgcgctggagaaggtttcgcgggaaaactgcgccactcccgcctgcagcagctcatgggcctcaacgcgtccccgcgctcgcgccagaatatggagatgtggaaagtgttgttgacacatctccaccagcttcatggtatcttccggctcgttgcaggtgataacgatcgactgcgcgtcttcggctcccgccgagcgcaggagctccagctgcgtcgcatcgccaaaataaactttatagccatatttacgcatcagattgaccgcgctgatatcgcgctccagtaccgtaatacgcattttgttcgccatcagcagacggccaatcacctggccgaaacgcccaaaaccaacgatgatcacctgcggtttgtcatcttcaacccacggagcctcgccctcctcttcaggttggttcaatcgccgcgaaaggactttatcgatgagcttcatcagcagcggcgtggtcatcatcgataatgtcaccgtcaccagcagcagggccatctgatcgttttgaaacaggcgaagcgaagcggggagtgagaacagcacaaaggcaaactctcccccctggctcagcacgccggcaaactgcacccgttcagagctgcgcaggccataaacccgtgccagaagatacaggacgagaccttttaccgtcaccagtatcgcgacgctggccacaacccacagtaaatgggtatagagcaccccaaggttcagcgccatgccaacggaaataaagaacagcccgaggagaagccctttaaacggctcaatggcgatttccagctcgtggcgatactcgctctctgccagcaggacgccggcgataaaggtccccagcgccatcgacaaaccgagcgcatccataaacaacgccgatccgagaaccagcagtagcgtcgccgcggtgaagacctcccgcacgccggatccggcgataaaccgaaataccggcctcagcagataacgaccgccaaccagcattccgccgaaggccagcaccttcatcccgatggtgagccagttaaaatggtcgtcacctgaccctgcgagcaggggaactagcgccagggccgggatcacggccagatcctgaaacagcagtacggagaagcccagctgcccggactcgctgcggctcatgcctttctcccgcatcagctgcagcgccatcgcggtggaagacatcgccagcccaatcccgccaaccaccgcagcgcgccatgagaagtcgctaagcatgagcaaaccgccaagtatcagcgcgctgaaggcgacctgagcggccccgacgccgaaaatggagcttctcagccgccacagcttggacggattcaactccagtccgatgataaacatcagaaagacgacgcctaattctgagaagtgaagaatttcatccacatcgctgatgaagcctaatccccaggggccgatggcgataccggccagcagatacccgagcacggcaccaatacccagcctcgccgccagcggcaccgccactacggcggcaaacagaaataacaccccggccagcagtaaatcagctcccgccatttggacctcccgccgttacagggttagccagccaatcgcggtaggcgcgagcgcggcttttcagatcgtcgggtgattgccgacgcgcccagtagacgataatcgggctcatccagtgcatgcggcacataccggcggtcagttcgaaagggcggagaatatcattcatcggataacgatgggcatcgcgccggtaggcgctctccggctcgccggtagtaatgacgctacgccagtactttcccgccagctgattccctcccgccccgctggcaaagccgcggctgagcaccctgtccagccactctttcatcagcgccgggcagctccaggtatagagcggatgctggaaaactatcacctcatgctggcgcaggagatcctgctcgcaggcgatatcgataaaaaaatccggatagtgcgcgtagagatcgtgcacggtaacattcgacaactgtaaggccggttcaagcaaaacccggttggccacggaatcctgagattctgggtgggcatacagcagcaaaactttcgctgtctgagacatctttcccctcccgaacgtcttctggcggcctgtgcagcggctgcgtcccgacgcaaccagaatgactttgtgtatcatcttcattttgggctaccattgcggcccggttgagcgattcgctcgacactacattatcataatgacaaattaacatagtcagaacatacggcgccttatgattgttttctcctccttacaaattcgtcgcggcgtacgcgtcctgctggacaacgctaccgccaccatcaacccagggcaaaaagtcggcctggtgggtaaaaacggctgcggtaaatccacgctgctttcgcttttgaaaaacgagattagcgccgacggcggctcaatgaccttccccggcagctggcagctggcctgggttaatcaggaaacacctgcgcttgcgcagccggctattgactatgttattgatggcgatcgcgaattccgcaagctggaggcggacctgcacgaagccaacgaacgtaatgacggccatgccatcgcgacggtccacggtaagctggacgccatcgacgcctggaccatccgctcgcgtgcggccagcctgctccacgggctcggtttcagcaacgaacagcttgaaagaccggtgagcgacttttccggcggctggcgtatgcgtctcaacctcgcgcaggcgctgatttgccgttccgatctgctgctgcttgatgaaccgacgaaccacctcgatctcgacgcggtcatctggctggagaagtggctcaaaggctacccggggaccctgatactgatctcccacgatcgcgattttctcgatccgatcgtcgacaaaattatccatatcgaacagcaaacgatgttcgagtacaccggcaactacagctcatttgaagtgcagcgcgcgacccgtcttgcgcagcaacagtcgatgtatgagagccagcagctgcgcgtcgcgcatttgcagagctacatcgaccgttttcgcgctaaagccaccaaagctaaacaggcgcaaagccgtatcaaaatgctcgagcgtatggagctcatcgcccctgcccacgttgataacccgtttcactttagcttccgcgcgccggaaagcctgcccaatcccctattgaaaatggaaaaggtcagcgccggttatggcgagcgcgtgatcctcgactcaatcaagctgaatctggttcccggttcgcgcatcggtctgctggggcgtaacggggccggtaaatcgacgctgataaaactgctggccggcgagctacagccgctgcagggtgaaattggtctggcgaaaggcatcaagcttggctactttgcccagcatcagctggagttcctgcgcgccgacgaatccccgctgcagcatcttgcccgtattgcgccgcaggagctggagcagaagctgcgcgactatctgggcggtttcggcttccagagcgataaagtcaacgaagagacaaagcgtttctccggcggcgagaaagcgcgcctggtgctggcgttaatcgtctggcagcggcctaacctgctgctgcttgatgaacccaccaaccacctcgatctcgatatgcgccaggcgctaaccgaagcgctcattgattttgagggcgcgctggtggtggtttcgcacgaccgtcatctgattcgctccaccaccgatgacctttatctggtgcacgacagcaaagtcgaacctttcgatggcgatcttgaagactatcagcagtggctgagcgactcgcaaaagcaggaaagccagacatcggaagagccaaaggaaaacggcaacagcgcccaggcgcgtaaagatcagaaacgccgggaagccgaactgcgtacgctgacccagccgctgcgcaaagagatcgcccgactggaaaaagagatggagaagttcaacgcgcagctggcgcaggcggaagagaagctgggcgacagcgaattgtacgatcaaagccgcaaagccgagctcactgcgtgtctacagcagcaggccagcgcgaagtccgggctggaagagtgtgaaatggcctggctggatgcccaggagcagctggagcagatgctacaggaaggctagcggcaatatgccatacgtgaaggcgggctaacccgccttttttcatcctccgcaccctggcttagcgctgcgccgccagtcgggcgcggatctgcgacagcgaggcatagccgtacagcttgccatccagaaagcgcgtttttaactcgccctgctgctcctgttccagcgtttgcccatcgtacagctgcagttcccccaaggcgtcgcgttccacgcgcagcagaccacgcgccgaacgtttaagaccattatcggttttcggctccttaaagagggctcttccctcgccgttcacctccccccaggttgccttcatcgcgaagccgaaggtatcgcgggtgttgtactggtaggtaaatgaacccacgccgaacaccacgttagcgctggcaaaacctttcgcttccaggcgacgcaggatctcatccgctctggcgagagtaatggaatcgccgtaaatcaggccgacatgcggatccagcaccttgtatcctttttcgttgatagtgccgccaaaaatttcccacagaatctccacggagcctttctcctcggcgctgcgctcgctgcgggtgtcgtcgtcagctgcggttccgcacagaatcgccaccggatcgccgctgtccggacggaataccacgcgcccctgacgctgcataattattgcctgcagctcgcgggtgtattcggtcagcacctgccagtagtcccaggtatccgagacgatagagacgaaaccctgcgggtggacttcggtaatcagccggcgaaaggtttcaatttcccgctcgcgctcgcccatacacatcacgctgtgttccgtagccggaatgctggcgccgatgagctcatcttcaccgcgagtgtaataatcacgggcatacagcagcgaaggcaggctatcggtccctttgaagctggccagatgtccgcagcccgactgcgcagtgtcgtgcagtccggacatcccccgaaacgaaaagtcgtgacattggaaatcaaggtgcgtcagatcgctacaggttttctccgcccagcgttcgcaaatcaggcgatagtggtgggcgatggtcgcgttggttgacactttccacagctccgccgaaagcaccgtctccagatagttcaccagccagaagaactcaggttgcgtattggtgatggtcagcaccggtactttcatcggcaccttggtgccttcatccagcgctttgatatgcagcggtaaatagccaagccgatgcagagcgcgaataggctccaccccaaccgtatcgcgccccagatagccgtccatcacctgcttatactcgttcacgacctcctcttccgggcgggcgaaaaacgcgtcgttaaacagatcgaccaggaaccactgcagaaagccctgcaggccgaaaaataccagcttgccatcggcctgcggcgactggaaaaaacgatcgctgcgcggggtaaagttagagtagaccttcgttgtcccctgtggatactgcacgcgatgggaaactttataaccatcgatggccagaatcggatttattttcatcatgttatcccctatgtgcgcggtagatggcgtcaatatcgataagctccagctgcggatgagccagggcaggagaagtcaaagatgtggtggcgtaaacggcatcgatgccgttattcaacagatgctctacgcctttggaaaaaataccgtgggtgacgtacagactcacgctgcgggcgcccgcctcgcgcagcacctgcgccgagccgataaaggtgccgcctgcgtcgcagaggtcgtcaacaataagcaccgctttacccgcgacatcaccggccagcagggaaaaaccggttaacgcgccgctggcaaggtcacgctctttaccgaggatcgcgaactctccggcaccgcaggctttagccacaggatgaatcttctttagcgcgccggcatccggcgccaccagcatcagctccccggcagcaatagcctgacgcagaccggcgctctgcagaagacagtgctgttgagccaccgcgaccatattattgactgccgccgctgcggcatcgctgtgcgggtcaagcaccacgactttgtcaaagccaagagtattaagctgccgggcaaagaccttcagcgcaaagctgtctcccggcaccatatgacgatcctgacgcgcccacggcagccacggcagttccagatggctaaacgtcacgtcggtaacatgacgcacggcctccaccagctgcgccagtagcataaaatcgttcatgtcgcgcagagcaaccgcccggatgcgcatcagacgggcggaaggcggtagtggatcggtcaccttcagccacacagcgccatcgggaaagacgccgctggcaagcgtaaacgcttcatcatccagttccagggtaaatttttcgctcatgatgacctccgctcattacattgtgtccctaagacacaattaataatgtccctaagacacatattgtgcaagcgttaaatgtcatttaagcggagattttgactaatcaattgaaaaacaataataaaaatggaggcttgctgcacaggaaggggctggtacacttgtcagcgttcttttccgctgcgagcgctctatgaccaacgatgccgaatacctcagccaatacgatgccagccgctttccctcgccgctggtgaccgtcgacagcgtcctgtttaccctgcatgaaggggcgctgtgcgttctgctggttgagcgcgctaatccaccgcagcagggggcgtgggggctacccggcggctttatcgatctggcgcacgatgattcaacccgcgccacggcgctacgtaagctcacggaaaaaaccgggatttcaccgtcatggctggagcagctcgacaccttctccgggccggatcgcgatccgcgcggctggagcctgactatcgcctggtttgcgttaatctcgtgggtagagtgtcagccgcatatcgccagcgtcagcgatgcccgctgggtgccggtggcgcagctggatagctattcgctggctttcgatcatcaaaagattattgacgccggtctgcatcgcttacgccaaaaaacgatgtactctttactgccggtttactgtctgccggagacctttacccatggtcagctgctggaagccacggaaatcatccttggtcagccgattcaacgcaaaagcctgattcgccgcttcgaagcctccggaatgtttgaagagaccggtgaaacagcggcaaccggcgcgcggaaagcgcggctatggcggcgtaaacccggcgtcgattttcatctcttttcacgtaacctgctgaccgattagccgcaaggccacatatgggctaacctgcgcacttcatgcgcggtatagtatgttataaagattatttattgctctggtgctatggttgatatcactcctacagaaatgacgccccctgaagacgactcgcagcagtttcatccgatgcgcggcgtaggcaatcgtcatttgcaaaccatgttgccgcggctaatccgtcgcaaactccgctttactccccactggcagcgtctggaattgccggacggcgattttgtcgatctggcatggagtgaagacccttctcaggcgcgccataaacctcgtctggtggtatttcatggcctggaggggagcctacacagcccttacgcacacggacttatccatgcggcaatgcagcgcggctggctgggcgtggtaatgcactttcgcggctgtagcggcgaacccaaccggaataaccgcatctaccactcgggcgaaacggaagacggctcctggtttctgcgctggctccagcgcgagtacggcacggtccccaccgccgcggtgggatattcgctcgggggcaatatgctgggctgcctgctggcaaaagaaggcgacgctattcccgttgatgccgcggttatcgtatcggcgccgtttatgctggaagcctgtagctatcatatggacaaaggtttctcccgcgtttatcagcgctacctgctcaacctgctgaaagccaacgccgcgcgtaagctaaaagcctatcccggctctctgcccgtcgatttacgccagctaaaaagcatgcgccgtatccgcgagtttgacgattgcattacggccaggatccacggttttgccgatgcgctggactactatcgccagtgtagcgccatgccgcgcctgagcgatatcactaagcccacgctgattattcacgcgaaggacgatccctttatggatcaccactcgattcccccgcaggagcagctgccggcgaatgtcgaatatcagctcacggagcacggcgggcacgttggcttcgtcggcggcacgctgcgtaagcctgaaatgtggcttgaaaaacgcatcccggattggctaacccgttggctaggagcgcaaatatgatcattccctggcaagatctcgatcccgaaacgctggataacctgatcgaaagttttgtattacgtgaaggcaccgattatggtgaacatgaacgttcgctgacggataaagtcgcggatgttaaacagcagttgaaaagcggagaagccgtgctggtgtggtcagaactgcacgaaacggtgaacatcatgccccgcaagcagtttcacggctaaggcggcacacactatcgtttactctgggagttgttatgtctgccaaacatccggtgattgccgtcacgggctccagcggcgcgggaaccacgaccaccagcctcgcctttcgcaaaattttcgcccagcttaatctgcacgccgccgaagttgaaggcgatagctttcaccgctatacccgtccggaaatggacatggcgatccgtaaagcgcgcgatcagggcaaacatatcagctactttggccccgaggctaacgacttcggcctgctggaacacacgttcgccgaatatgggcaaagcggcaaaggccagtcgcgcaaatatttacatacctatgacgaggccgtgccgtggaatcaggttccggggaccttcacgccctggcagccgctgccggaaccgactgacgtcctgttttatgaaggcctgcacggcggcgtcgtgacgccgcagcataacgtagcaaaccatgtcgacctgctggtcggcgtggtgcccatcgtcaatcttgagtggatccagaagcttatccgcgacaccagcgagcgcggacactctcgtgaggcggtcatggattccgtggtccgctcgatggaagattacatcaactttatcaccccgcagttttcacgcacccacctcaactttcagcgcgtaccgacggtggatacgtccaacccgtttgcggccaaagccatcccttcactggatgaaagctttgtcgttatccatttccgtaatctaaaaaatatcgatttcccctggctcctggcgatgctgcagggctcgtttatttcgcatatgaataccctggtggtaccgggcgggaaaatggggctggcgatggaactgattatggcgccgctggttgaacggctgatggaaggccggaaaatcagcgagtagccagaaccccggtggcgcgattgccggccggggcgcgttcggcttacccttcgatcacttcataagagtgggtaatgtttaccgctttctcaagcatcagcgcgacggaacaatacttttccgccgacaggtcgaccgcgcgagacacggcagcgtccttcagttctttaccggtcacgataaaatgcagattgatatgggtaaacagacgcggcgcctcttcgcggcgctccgaggtcagcttaacttcgcagttggtgacgttctggcggcccttctgcaatatggaaaccacatcaatcgcgctgcatccgcctgccgccatcagtaccatttccattgggctgggcgctttatccccggaattgccgtccatcagaatctggtggccagaagccgactcaccgatgaaggttaacccttcaacccacttcactcgcgcttgcataaatttaactccagggctgtaattttcctgacagattacgcgtacataacaattctcgcaacggaaggcgacctgggtcatgctgaagcgagacaccaggagacatgcggcgaaagctatgctaaaacaatctggatgctacagtaatacattgatgtactgcatgtatgcagaggagttcacattacaggctgcagaaaactttcagccggattcccaggtatagggattcaatacgattgcatgcccggatgccgtgtagtgtcggcacccggagatagcttataacagaggataaccgcgcatggtgcttggcaaaccgcaaacagaccctacccttgaatggttcttgtctcattgccacattcataagtacccatcaaagagcacgctgatccaccagggtgagaaagcagaaacgttgtactacatcgttaaaggctccgtggctgtactcatcaaggatgaagaaggtaaagagatgatcctctcttaccttaatcagggcgatttcatcggtgaattaggcttgtttgaagaaggccaggagcgtagcgcttgggtacgtgcgaaaaccgcatgtgaagtggccgaaatctcctacaaaaagttccgtcagctgatccaggttaacccggacatcctgatgcgtctctcttcgcagatggctcgtcgtctgcaggtcacgtctgagaaagtcggcaacctcgccttccttgacgttaccggtcgtatcgctcagacgctgctgaacctggctaaacagccggatgcgatgacccacccggacggtatgcaaattaaaattacccgccaggaaattggtcagatcgtcggatgctcccgcgagaccgttggccgcatcctgaaaatgctggaagatcaaaacctgatctccgcgcacggtaaaactatcgtcgtctacggtacccgttaagtcggtaaaacggcgtattgcctgacaatacgccgtttttgttttcccctcatgtggcgcaggctgatttaccacccggaagtcaactatgcactgcggcaaacgctggtgttgtgtctgccggttgcgattgggcttctgctcggtcatctccagcaggggctgctgttttctcttgttcccgcctgctgcaacgttgccgggctggatacgccgcataaacgcttctttaaacgcctgattatcggcggcagcctgtttgccggctgtagcctgatcgttcagctccttctgcagcgagacatccctttgccgctgatcctcacgggtctggcgctcatcctcggcgtcaccgccgaaatcagctccctgcacgctcggctgctgcccgcctcgcttatcgcggctatttttaccctcagcctcgctggcaatatgcctatctgggagccgctgttaatctacgccatgggcaccttatggtatggcgtgtttaactggttctggttttggctgtggcgcgaacagccgctgcgcgaatcattaagcctgctctaccgggagctggccaactactgcgaggccaaatacagtctgcttacccagcatacggaccccgccacatcgctgccgccgctgctcaaccgccagcagaaggtggtggatctgattacccagtgctatcagcagatgcatatgctggcggctaaccagcgcagcgatcacaaacgcctgctgcgcgctttccaggttggactggaccttcaggaacatatttccgtcagtcttcatcagccggaagaggtgcagaaactggtggagcgcagccacgcggaagcggtgattcgctggaacgcgcaaaccgttgccgcccgcctgcgggagctggcggacgatctcctctaccaccgttatcctcagcgctttcagatggataaacagatcggcgcgctggaaaaaatcgcctggcagcatccggataatccggttggccagttctgcgcctggcacttcagccgcattgccagggttctgcgcacccagcgcccgctatacgcgcgtaacctgatggcggataaaacccgccgcctgccgctgctgcccgcgttgaaaaactatctgtcgcttaagtcgccggcgttacgaaacgcggcgcgtatcagcgtgatgctgagcgtcgccagcctgatgggcagcgcgctgcatctgcctaagccctactggatcctgatgaccgtgctgttcgtgacgcaaaacggctacggcgcaacccgggtacgtatcgtccatcgggctgccggaaccattgcgggactggtcattgccgggctcacgctgcactttcacgttcctgaaggctatacgctgaccgcgatgctgttcatcacgctgttaagctatctgattatccgcaagcactacggctgggcgatggtcgggtttacggtgacggcggtgtacactctgcagctgctcactctgaacggcgagcagtttatcatcgccagactgattgatacgctgattggctgtctgatcgccttcggcggaatggtctggctatggccgcagtggcaaagcgggctgctgcgcaaaaatgcccacgatgcgctggaagccgatcaggaagcgatcaggctgatcctcagcgacgatcatcaggccccggcgctggcctaccagcgcatgcgcgttaatcaggcgcataacgcgctgtttaactcgctgaatcaggcgatgcaggaacccggctttaactcgcactatctggaagacatgaagctgtgggtgacccacagccagtttattgtcgagcatattaacgcgatgaccactctggcgcgcgagcacaatatgctgacgccggatctggcacagcgttatctggaatcctgcgagattgcgctccagcgctgccagcagcggctggattccgacgggccgggcagcgcgggggatgtgaacattatggaggcgcatgatgcggaggttcctcgcggcccgctcagtacgatggagcagcatttgcagcgcatcctcgggcatctgaacaccatgcacaccatttcatcggtggcatggcgtcagcgtccgcatcatggcatctggctgcgcgccactaagcgctaagcacccgctcaaccgccagggcaaagcacgccatgccttcagcaatatcgctatcatcaatcaccagcgacggtacgaagcgcatcacgtccggtccggcattgagcaccatgacgcccgcctctgcggcggcgtagaggaaatcgcgcgccttcccgtgatactgcggcttcagctcggcgccgataagcaaacccatgccgcgaatatcgctgaacagatcgaaccgcgcgtcaatgcgctgaaggtgctcaacaaacagctcgcgcttcgcggtgacgccgtccagcacttccggcgtgttaatcagatcgaaggccgctccgccgaccgcgcaggccagggggttaccgccgtaggttgagccgtgagaaccggcgtggaaagcgctggcgatatcatgggtggtcagcatcgcgctgatagggaagccgccgccaagcgccttggcgctggtcagaatatccggcgtcacgccgtagtgcatataggcaaacagcgagcctgtgcgccccataccgcactgtacttcatcaaacaccagcagtgcctggtgctggtcgcagagatcgcgcaatccttgcaggaattccggcgtcgccgccgtcactccgccttcaccctgaatcggctcgaccaccaccgcgcaggtatgatcgtccatcacggctttcaccgcgtgtaaatcgttaaacggcacgtgaacgatatcggccggtttcggcccaaacccgtcggaatatttcggctgaccgccgacggagacggtgaaaagcgagcgaccgtgaaacgcattatggaaagcgatgattttggttttgtacgggctatggcgggtcacggtgtaatggcgagccagcttgaaagccgtttcgttagcttccgtaccggagttcataaacacgacgcgatcggcaaaagtcgcatccaccagcttccgcccgagtcgcagggcgggttcgttggtaaaaacgttgctggtatgccacagcttttcaccctgctcatgcagtgccgccaccagcgccggatggcaatgaccgagcgcggtcacggcaatcccaccggcgaaatcaacgtactctttaccctgctgatcccatacccggcttcccttacccttcaccggaataaattctgccggtgcataaatcggcaaaatgacctcatcgaatgtagcgcgggtgattgccggttgttcagttgccatgtggtgcccatcctttacgttatgcagcaatgattatgataatctaatcacaaaatatgcataaaaaatcaactcatggcaactacaaatcaccgattgaggaagtttgccagcagctggtggccctgctcgctgagaatactctccggatgaaactgcacgccctcgagatcgaacacgcggtggcgaatgcccatgatctccccctcttcgctgcgggcggtcacctcaaagcattcaggcagcgttagcggatcaatgagcagggagtggtagcgggtcaccgtaagcgggttattcagtccaaggaacaccccttgaccggtatggctaacgggggacgtttttccgtgcatgactttggcggctcgtacgatagcggcgccgaaaacctgggcgatggcctgatggccgaggcaaacgcctaagatcggcgtttggccggaaaaatggcggatcgccgccagtgaaatccccgactcatccggcgtacaggggcccggcgagataactattttcgctggcgccagggaaataatgtccgctaacgtcagctcgtcgttacgcctgaccagcacttccgccccaagttcgcagaaatactggtacaaattccaggtgaaagaatcgtagttatcgataagcaggatcatagcggctccgggaacaaagaaccgcgctattctactcagtttccgtcgcttcgcttaccactttgcgaaatatcgtccgcagtggagaaaggtcgcccatcgctccgctctggttggcctggttccacgcatcgaccgcaatatcgcgccaatccagcgtatagcccgcatggatagccagctgctcaaagaaaatgcgttgcgccaagccgttaccgagacggaaaggatgcaggacgttaatttcgcagtagtaatgagcaagacgttcaatgaatttatcctgcgcgagacccaccagataaccttcctcttcaagatcctgaagcagcgcgttcccctctttttcgatataggcgaaatggcagaaacgggtgtcgccctgatagatatccacttcacgcagctgccccgcccagtcgaagacatcctgatagagctggcgatgaatagcgcagagatgaggcaatccccgcaccaacggcccgagttcaatggttgccgcgcgtaatgcggtcagctcccacgccgcctgctcaagtcgctgagcctggcgaatccccaggcggttgcgcatcaccttaagaccggggtagagataggggtcccgcccctcgccgaatttatcgctcatagtgactccttaacgccgcaatgcgcgccagggcttcttcgggggtaagggttatcagcggaacatcgacgccctccagccgtcggctggcctgaaaattcacgttacgtcgatcctcccagagacgggatttctgtttttcggtgagctttttcatttaacacctccctgacgcgtccgcagttgccacaagtataagcggcaaaaaacgatttcgcagggaagcgggggctgcgcgggtacgggttacccgcgcaaaataagattacggcagaacttttgcggaaaggatcacgataggtttggacggtacattctgatacgggccaacgttatgggtcggcacctgagaaatcttatccgccacgtccatacctttaacgactttaccaaacaccgcatagccaaaatcacgctggccatgatcgaggaaggcgttatccgcaatattgataaagaactggctggtggcgctgtcctgatcggcggtacgcgccatggcgatggtgccacgcgtattgcgcaggccgttgtcggcttcgtttttaatcggtggattaggctgtttctgctgcatctgctcgttaaagccgccgccctgcaccataaagcccgggatcacgcggtgaaaagtggtgttgttataaaagccgctgttcacgtacttgaggaagttatccaccgagatcggtgctttctggctattcagctcaagctcaatattgcccgcagacgtggtcagcaacacatggggatccccttttgccgccatggccggggagaatgctgaaatggcgaaaacggcagccaccgccgcgagagttgatttgagcatggaaattccttaacggagcagaataaaaaccgagtgctttgattctaaagagcctttgcatcctgggccagccttttacctaattttacttagctgaaacagttgtaacggtgggcctggcgatcggctaaatagataaatgtgatattagtcacactaagaattgcaaaaagatataaatttcagaataaacgtttgcttgaatcacgctaacgcataaaatctgtccgcccggcgcagagtcaacgcgctttacatttctattcacaggccagtcatgactaacagcaatcgtatcaagctcacatggatcagcttcttctcctacgccctgaccggcgcgttggtgattgtcaccgggatggtgatgggaaatatcgcagattattttcatctgcccgtttccagtatgagcaacacctttactttccttaatgccggtatcctgatctctatcttcctgaacgcctggctgatggaaattgttccgctgaaaacccagctgcgttttggctttatcctgatggttctggccgtcgcgggtttaatgttcagccacagcctggcgctgttttccgcttcgatgttcgtgcttggcctggtcagcgggattaccatgtcgattggtaccttcctgatcacccatatgtatgaaggccgtcagcgcggggcgcgtctgctgttcaccgactccttcttcagcatggcggggatgatcttcccgatgctggccgcttatctgctggcgcgcagcatcgaatggtactgggtttatgcctgcatcggcctggtgtacgtcgctattttcattctgaccttcggctgcgaattcccggtattgggcaaaaaagccctgcaggatagccagccggtcgtgaaagaaaaatggggtatcggcgtgctgtttctctccatcgctgcgctatgctacatcctcggccagttgggtttcatctcctgggtaccggaatacgccaaaggcctgggcatgagtcttggcgatgcgggtaaactggtaagcgatttctggatgtcgtacatgatcggcatgtggtctttcagcttcatcctgcgcttcttcgacctgcagcgtattctgaccgtgctggcgggcgtagcgacggtactgatgtatctgtttatcaacggttcgccggagcatatgccgtggtttattctgaccctcggcttcttctccagcgccatctatacgtcgatcatcaccctgggttcacagcaaacccgagtgtcgtcgccgaagctggtgaacttcattctgacctgcggaaccgtgggtactatgctgactttcgtcgtgaccggccctatcgttgccgccagcggtccgctggcagcgctgcataccgctaacggcctctatgccgtggtgtttgtgatgtgtctgatcctcggcttcgtctcccgccaccgtcagaacaacgcggcagcggaatcgcactaagcctcaggcccctttgttccggcaaaggggctatttcgggtaaagaacagctcctcaccgccccgatccatctgaacccaggtttgcgccagctgcgtggtggcgatgactctcccctggcggattgaccaacgcaccggaacctgacaacgcacggcctcaaacccgttttccgcgggcagaatcaccagattcgccgtgttccccgtcgcaataccgtaatcgctcaggccaaacgtgcgcgcgctattttccgtgaccagcttcagtccctcgttaatctgctgatagcccatcatctggcaaacgtgcagacccatgtgcagcacctgcagcatattgccggtccccagcggataccaggggtcaaatacatcgtcatggccaaagcagacgttaatgcccgccgccatcagctccttcacgcgcgtgataccgcgacgcttcggatagtcgtcaaagcgtccctggaggtgaatattgaccagcgggttagcgacgaagttaatgccggagagcttcagcaaacgaaaaagacgtgacgtataggcgccattgtaggagtgcatcgcggtggtatggctggcggttacttgcggacctatcccctcttttaacgccagggccgccacggtttcaacgaaccgcgactgttcatcatcaatttcatcgcagtggatatccagaggccgctgatactttttcgccagacggaaagcgatgtgcagggattccacgccatattcgcgcgtaaattcaaaatgcggaatcgcgcccaccacgtcggcccccagacgcagcgcctcttccagcagggcctcaccattggggtaggataaaatgccctcctgggggaaggcgacaatctgcagctctacccacggcgcgacctcctgctttacctccagcatggctttgagcgcggtcagcgtcggatcggaaacatcaacgtgggtacgaacaaactggatgccgttggcgatctgccacttcagcgtcttccacgcgcgggctttaacgtcctcatggctcaataaagccttacgctccgcccaacgctcaatcccttcaaacagcgtcccggactggttccagttcggctctccggcggtttgggtcgtatcaaggtggatatgcggctcaataaaaggggggatggccagtccgccgcgggcgttcagcacttcaaaattctctttgcgcgcctcccccataggggtgatatccccgaagcgccccttgtctatcgctatctgccataacccttcgcgatcgggcagacgaacgttctcaattaaccaaagcggcgctgctgtcatatcgatgactcccgtaattgttgctgaagttttactcaacccgccgtgggtatccgttgctaattttgtacataaaaaaagcaaaaaggaaaagccagcgttttccgttacttataaaaatactgacaaatcataaacataccacttaagtagtaggtaaaggtgtaattgatttgcatcaataagtgtcgcggctgaatcgttaaggtaggcggtaatataaaagaaatcgaggcaaaaatgagcaaagtcagactcgctatcattggtaatggtatggtcggccaccgctttattgaggaccttcttgataaatccgacgccagcctgttcgatattaccgtcttctgtgaagaaccccgtatcgcctacgaccgcgtgcacctctcctcctacttctctcaccataccgccgaagaactctctttggtacgggaaggtttctacgagaagcacggcgttaaggtgctggtcggcgaacgcgccatcaccatcaaccgccaggagaaggttatccactccagcgcgggccgtaccgttttctatgacaagctgattatggcgaccggttcctatccgtggatcccgccgattaaaggttctgaaacccaggactgctttgtttatcgtaccattgaagaccttaacgcgattgaagcctgcgcccgccgcagcaaacgcggcgcggtcgtcggcggaggtttgttaggcctcgaagccgcgggcgcgctgaaaaacctcggcgttgagacccacgtgattgaattcgcgcccatgctgatggcggaacagctggatcagatgggtggcgaacagctacgtcgcaagattgaaagcatgggcgtgcgcgtgcacaccagtaaaaacaccaaagagatcgttcaggaaggtaccgaagcgcgtaaaaccatgcgttttgccgacggcagcgagctggaagtcgactttatcgtcttctctaccggtatccgcccgcgcgataagctggccacccagtgcggtctggaagtcgctccgcgcggcggcatcgtgattaacgacgcctgccagacctctgacccggatatctacgccatcggtgaatgcgccagctggaacaaccgcgtttacggcctggtcgccccgggctacaaaatggctcaggttaccgttgaccatatcctccagaccgaaaacgcctttgaaggcgcggatcttagcgccaagctgaagctgctgggcgttgacgtcggcggcattggcgacgctcacggtcgtacgccgggcgcgcgcagctacgtttacctcgacgaaagcaaagaggtctacaaacgccttatcgtcagccctgacaacaagaccctgctcggcgcggtgctggtgggcgataccagcgattacggcaacctgctgcagctggtgctgaacgccatcgaactgccggaaaaccccgactcgctgatcctgccggcgcacgcgggcagcggtaagccgtccatcggcgtcgataaactgccggacagcgcgcaaatttgttcctgcttcgatgtcaccaagggcgcattgattgccgccattaataaaggctgccacacggtggcggcgctgaaggcagaaaccaaagccggtaccggctgcggcggctgtatcccgctggtgactcaggtgctcaacgccgaactggcgaaacagggcatcgaagtcaacaataacctgtgcgagcactttgcgtactcccgtcaggaactgttccacctcatccgggtggaaggcatcaaaacctttgaagagctgctggcgaaacacggtaaaggctacggctgcgaagtgtgtaaaccgaccgtgggctctctgctggcttcctgctggaacgaatatatcctcaagccgcagcataccccgctgcaggataccaacgacaacttcctggccaacatccagaaagacggcacctactccgttatcccgcgctctgcgggcggcgaaatcacgccggaaggcctggtggccgtcggccgtatcgcccgcgaatttaatctgtacaccaagatcaccggctctcagcgtatcggcctgttcggcgcgcaaaaagacgatctgccggaaatctggcgtcagctgatcgacgcgggcttcgaaaccggtcacgcgtatgccaaggcgctgcggatggcgaaaacctgcgtaggcagcacctggtgccgctacggcgtaggcgacagcgtgggtttcggcgtcgagctggaaaaccgctacaaaggcattcgtacgccgcataaaatgaagtttggcgtctccggctgtacccgtgaatgtgcggaagcccagggtaaagacgtcggcatcatcgccacggagaaaggctggaacctttacgtctgcggcaacggcggcatgaagccgcgccacgcggatctgctggcagcggatcttgaccgcgaaacgctgatgaaatacctcgaccgcttcatgatgttctatatccgtaccgccgacaaactgacccgtaccgcgccgtggctggacaacctggaaggcggcatcgattatctgaagtcggtcatcatcgacgacaagctgggactgaacgagcatctggaagaagagatggctcgcctgcgtgcagcggtagtctgcgagtggacggaaaccgttaactcgccagcggcccaggtacgcttcaaacactttatcaacagcgacaagcgcgaccctaacgtccaggtagtgcctgagcgtgaacaacatcgcccggccacgccgtacgaacgtatcccggtaactctggtggaggaaaacgcatgagccagtggaaaaacatctgcaaactcgatgacatcctgccggaaaccggcgtctgcgcgctgttaggcgacaaacaggtggcgattttccgcccgtatcacggcgaccaggtgtttgcgattagcaatatcgacccgttctttgaatccagcgtcctgtctcgcggcctgatcgccgagcatcagggcgagctgtgggttgccagtccgctgaaaaagcagcgcttccgcctgcgcgacggcctgtgtatggaagatgaaagccattcggtggcgcactatgaagcccgagtgaaagacggcgtcgtgcagctacgcagttaatcactttacgggaggcgcaacgcctccctttttttgcatttttttcttcaatttatggcacaacatcatttgtactgcatcgcgaaggcagctaaccaagagccagcgcaagggatgaggtgctaaaggaactcctatgtttacggacacaataaacaagtgcgcggccaacgccgggcgcattgcgcgcctctcggccaatcatccactcagcttctgggtcagcgccatgatggcgggcgcctacgtcggcctcggcatcatccttatattcaccctcggcaacctgctcgaccctgccgttcgcccgctggtgatgggcgccacctttggcattgcgttaacgctggtgattatcgccggctctgaattgttcaccggccacaccatgttcctgaccctgggcgtgaaggcggggaccatcagccaggggcagatgtgggcgattctgccgcaaacctggatgggtaaccttgcgggttccgttttcgtggcgctgctgtatagctggggcggcggcagcctgctgccggtcgataccagcctcgtccacaccgtcgcgctggcaaaaaccagccaatccgcgatggcgctctttttcaaaggcgcactgtgtaactggctggtgtgtctggcgatctggatggcaatccgtaccgaaggcgcggcaaaatttattgctatctggtggtgtctgctggcgtttatcgcgtccggctatgagcactccgtcgccaacatgacgctgtttgccctctcctggtttggccatcatagcgatgcctacaggcttgcgggaatcggtcacaatctgttatgggtaacactcggcaatactttgtccggtgtcgtatttatgggattgggttattggtatgctacgccgcaatcggagcgccccgccccggaaaaaactaacgagactaagagtctggctcagtagacctaatcggtgcaggcaggttgaacattgcccaggttcaacctgataaataagatagcctgatagccagattctaaggctgctgccaataattaagagggaatgtcgtggaccatttgcctatattttgccaattacgcgatcgcgactgcctgttagtcggcggcggcgatgtggctgaacgtaaagctcgcctgttactggacgccggcgccagattaacggtcaatgccctggattttgtgccgcaattccaggtatgggccgatgcaaacatgctgaccctggtgcagggcgagtttaatcctgctctgctggataactgctggctggccattgccgcaaccgacaacgaagcggttaatcaacgggtcagcgcgtcagcggaagaaaggcgaatattttgtaacgtggtcgacgcccctcagcaggccagctttattatgccgtcgattatcgaccgctcgccgctgatggtggccgtctcatccggcggcacctcgccggttctggcgcgcctgctgcgcgaaaagctggagtcagttttaccgctgcatttaggccagctggcccactacgctggtcagctgcgctcacgggtgaaaaaacagtttgccaccgtcggcgagcgccgacgcttttgggagaaactgtttgttaacgacaggctggcgcagtcgctggccaacgaggaccgccaggccgtcgctgacgccacggagcagctgctgaccgagccgctggatcatcgcggtgaagtggtactggtgggcgccggccccggcgacgccggactgctgaccctcaaaggcctgcagcaaatacagcaggccgatgtcgtggtttatgaccgcctggtctccgacgatatcatgaatctggtgcgccgcgatgccgaccgggtcttcgtgggtaaacgctcaggctaccactgcgtaccgcaggaagagattaaccagattctgctgcgcgaagcccagggggggaaacgcgttgtacgactgaaaggcggcgatccgtttatctttggccgcggcggcgaagagctggaaaccttgtgccatgccggtattccgttctccgttgtaccgggaattaccgcggcctcaggctgttccgcctactcgggcattcccctgacccaccgggattttgcccagggcgtgcgcctggtcaccggccaccttaagaccggcggcgagctggactgggaaaacctggcggttgaaaagcaaaccctggtgttttatatgggcctgaaccaggccccggcgatccgggaaaaactgattgcccacggcatggcggcggatatgcccgcagccatcgttgaaaacggaacggcgataacgcagaaggttgtcaccggcacgttagagcaattggatattctggcccagcaaatggccagcccggcgctgattattgtcggccgcgtggtcggcctgcgcgataagctgaactggttctccaaccattaatgacgctgatgtagctcaaagccgctcgcaaattaaaaagccggatacattgcacccggctttttattgcgctgagaccagcaaattgctcagggcttagcgacgaaaccaatcgcttcgtaaaccgctttcagggtaacggaagcgcgagcgctggctttctccgccccctccttcatgacctgattgaggaatgcttcatcaccgcggaatcggtgatagcgctcctgcagttcggtcagcatgccggaaacggcttcagccacttcgcccttcaggtgaccgtacattttgccttcaaaatgctgctccagctctggaatgctctgaccggtaacggcagagaggatatccagcaggttggagacgcccgctttgttctggatgtcgtagcgaacaaccggcggctcgtcggagtcggtgaccgcgcgtttgatcttcttcaccaccgatttcgggtcttccagcaggccgataacgttgttgcggttatcatctgacttggacatctttttggtcggctccagcagcgacatcacgcgcgcgccggattttggaataaacggttccggcactttaaacacgtcgccgtagatagcgttgaaacgctgggcgacatcgcggctcagctccaggtgctgtttctggtcttcgccaaccgggacctggttagtctgatacagcagaatgtcggcagccatcagtaccggatagtcaaacagaccggcgttaatgttttccgcatagcgcgatgacttgtctttaaactgggtcatacggctcagttcgccgaaataggtgtagcagttcagcgcccagccgagctgcgcgtgctccggcacgtgggactgaacgaagatggtgcttttttgcgggtcgataccgcacgccagatacagcgccagcgtgtccagcgtggccttacgcagctgctgcgggtcctgacgaacggtaatcgcgtgctggtcaacgatgcagtaaatgcagtggtaatcgtcctgcatgtttacccactgacgcagcgcacccatatagttgccaatggtcaattcaccggagggctgtgcgccactaaaaacgatgggcttagtcattttttattcctgagtttcactgtacggtagcccgaaagcgggcaagagttcattaaattggtcaaagatataatccggctcgctcagcgaaatcggctcgccgtagttgtagccgtaggtcaggccgatcgaactgcagcccgcggccttcgcggcctgaatatcgttgcgcgagtcgccaacgaacagcagctccgcgggtgccagccccagtttctccgcgaccagaagcagcggttccgggtgcggttttttgtttttacatcatcgccgccgataacaacggtaaaatatttcgcgatatccagcgacgccagaatcggcgcgacaaagggcgtcggtttattggttaccagcgccagcggcaggccctttgcgtgcagcgcgcccagcgtatcggcaacggcgggaaacaaaaagctcccctcttccgccacttcgccatagtagcgatcgaacagcttgcgcaaaatggcctgctgttcagcctgcgggatatcgtcatgatcgacggaaggtttaccctgcgccgctctcagcgccgcgcgctcctgacgggcccaggtcagagcccgctggatcagaacgtcagcgccgttgccaatccaggtcacgacgcgctcttcgcccgccatcggcagttccagcgcataaagggcgttatcaacggcagcggtcaatcccggcgcgctgtctaccagcgtcccgtcgagatcgaacgccacgccgcgaatattttgtaacttatccatggctaacctttgctaattcgctacgcatttgatcgaccacttttttgtagtcaggctgatcgaaaatagccgatccggcaacaaacatatccgcaccggctgcggcaatctcagcgatattgctgacttttacgccgccgtcgacttccagacggatgtcgtagccggattcatcaatgcgacgacgaacttcacgcagtttttccagggtgtgcggaataaaagactgaccgccaaagcctgggttgacggacatcagcaggatgacatccagcttatccatcacgtagtcgaggtagctcagggaggtggccgggttaaacaccagaccggctttacagccatgctctttgataagctgcagcgtgcggtcaacgtgttcagaagcttccgggtggaaagtaatgatgctggcgcccgcggcggcaaaatcaggaacgatgcggtcaacgggcttgaccatcaaatgcacatcaatcggcgcggtgataccgtaatttcgcagtgatttaagcaccatcggaccaatggtcagattcggcacgtagtggttgtccatcacgtcaaagtgcacaacatccgcacccgcagccaacgcattggcggtatcctcgcccagacgggcaaaatcagccgacagaatcgaaggggcaatcaaatactgcttcatccgcatctccttgaaatttatttggtcttgggcggacggtacagagccagaagctcgtccaccttcttacgtgtaccaccgttgctgctgatgctgcgtcgaaccttcacaatatgcgtctcagcggcgtttttgtaccactcctcagtgagcggcgtgcgatggtttgaaatcagcactggaatgcgctttttcatcagcgattccgcctttttagccagcagctcctgctgctcctggctaaagctattcgtatgataagccgtaaaattcgccgttgatgacagcggcgcatagggcggatcgcagtaaacaacggagcggttatctgcccgcttcatgcactcttcataagattcacaatgaaactctgcatgctgcgccttctccgcgaaatgatacagctcagcttcgggaaaatagggcttcttatagcgaccaaacggcacgttaaactcaccgcgcagattgtagcgacacaggccattgtagccatgacgattcagatacaggaacagcaccgcgcgacgcagcggctcctggctctggttgaactcatcacggaaccgataatactgctctgtgacgttgttctctggcgtaaacatctcacgcgccgccgtaacatagtcatcggtacgcagcttgacgatgttatacagactaatcaaatcactattgatatcagcgaggatataacgagaaaagtcggtattcagaaataccgacccggcgcccacaaaaggctcaatcaagcagtcgccctgcggcaaatgcttcttaatatcgtcaagcagggggtatttaccccctgcccatttcagaaaagcgcgattctttttcatgctgcctaactaattacacattctccggctgtggagaaagctccgacagcatcctgcgcttcagactacactgcggcattatttcaggtcagactgaacctgatgcagcggttttgcccacggattttttgcctgtacatctgctggcagcgtagcaacagcacgtttcgcttcatctttcgaagcgtagatgccgctcaccaggacataccagggctgtccgttacgcgtagtctcatagacaacatacttttccagcttctctttcttcgcccaactgttgaggttgttgtagttagaagagctgctgagctgcagcgtgtagtgaccggacggcgcagacttcatcgaactgacgtcacccgcacttttacccgcagcggccgtagcagccggagcggcagcggcagttgctgctggcgcggtggtcgcggtcgcagcaggcgcggtagtcgcggctggtttggcctgggcagttgcggcaggcttagtcggctgcgcggctgccggcttcgtggtcgcgacgttttcgacacgcttaggctggaccgctgccggcttcggctgggtcggtgctttcgccgtggcctgcggtttcggttcgataaccgtatgcttacgctccgccggacgcggtgtcgccgccgtctgacgctctgtcgtcgcctggcgcggggccgcggtgccattgcgcactggcgcaacggtggcaggttcagttggcagagtagaattcgcgaccgcgctatcaatctgaccctgctgctgggtcagcgcattgttcagatcgccctgaacctcaacgcgctgctggccttggggttcagccgtcgcctgaccttgagtcgggttagacgcgataggcggcagagaaacatcctgcggctgcgcgttgtttgccgctgatgaatcctgagcagcaggctgggtattattattgtcctgctcgccggacaggttgatgctcttctcgccggaagccgtttgctcgctggatgaggatggtgatttcagcgcggaacccacgccaacgatcagcagcagcagaacgaggatccccacgcccatcatgatgtactgacgggaagccggtttcgcaggcgccttcttacgcttacgaggacggcgctcaacctgacgctcttcgtcatcgtcttcgtcagactctacttcttcttcgtactcttcatactgttcttcatcgcgctcacggcgtgctttgctgccgcgcgtcgggcgaccatcgtcagcatcatcaagttcgacatcatcaaaattgatttgcggatcggcatcacgctctgaagactgacgagaacgaccagtacgacgatcgctgcgatcggctttcatatcgtcttctggttttaattcatccatttaacaccccactaaaaggcttatgctcacgactattgcacgtcacccgaaatgataacgccgcgcgaacgcggccagaccttcttattgttgcgcctgctgagtatcagcaatcgcgccaagaacaacatcatgcgggactccgccgcgtatctcgctcttccctatcgcgaggggtagcaccagccgcatctcgcccgccagcacctttttatcacgcatcatatggggcaaatacgcctctgctgccatctcctgcgggccacttaccggcaagccagcacgctgcagcagatgaataatgcgctgcgtatcctgcggattaaaccgccccagacgttcggatgcacgcgccgccatcaccataccggcagcgaccgcttcaccatgtaaccagttaccgtagcccatctcagcttcgatagcatgaccaaaagtatggccaagattgagtaaagcacgtaacccggtttcgcgctcgtcggcggcgacaacttcagctttcagctcacagcagcgacggatacagtacgccatcgctttttcatccagcgccagcaatgcatcaatattattttccagccagtcgaaaaattcgccgtcaagaataacgccgtacttgatcacttcagccaggccggaagagagctcacgcttcggcagcgttttgagacagttaagatcgacaacaacagaaaccggctgccagaaggcgccaatcatgtttttgccgagaggatggttgacggccgttttgccgccgaccgaagaatccacctgcgacagcagagtggtaggaacctgaataaagcgcacgccacgctggtagctggccgctgcaaatcccgttaaatcaccaatcaccccaccgccgagcgccactaacgtcgtgtcgcggccgtgtggtttttgcaatagcgcggtaaaaacggtatccatcaccgccaggcttttaaactgctcgccgtcgggaagaatcacgctatcgacttttacgcccgcttgctcaagtacggagcgtacggtatccagataaagcggcgccagcgtttcattggtgaccagcatgacctggtcgcctgatttcagtggcaggaaggaagctggatcgttaaacaaaccagccgcgatggtaatcgggtaactacgttccccgagggttacagtaagcctctccataacgcgacgtccacctcagttgcttttactctgacgcactttattaagccagaatcagttgctttccagcatatgaataatctggtttgctaccactttcgcgctttgatcgtcagtgcggatagtgacatctgcaatctcttcgtacagcggattgcgttcatccgccagcgcttccagtacttcgcgaggcggagcatcaacctgcagcaaaggacgctttttatcgcgctgcgtacgggcaagctgcttttcgatagttgtttccaggtagaccaccacgccgcgggcggagagacggttacgcgtttcacgggattttacagagccaccgccggttgccagcacgattccctgtttttccgtcaactcattgatgattttttcttcacggtcgcggaagccgtcttcgccttctacatcaaagacccaacccacatctgcgccagtgcgtttctcaatttcttgatcggaatcgtaaaattccatgttgagctgttgggctaactggcgcccaatagtgcttttgccggcacccataggcccaaccagaaagatattgcgtttctctgccattttttcggtactactaagactattcgttaatggtaaacccgcttcgcagacacccagcgcagcaggacatgaactgaaacctcatatgcaattagagcgagagtcagactaaaaattatctcaatactccggctggtttggcaacagaataaatcaccggacaagaaagggaggattgatgtcgtacccgactctcaaatcggtaccccttgtatgctaaatccgtcctcacgtcaaacacctgaaacgtgtttagcatgaaaaacccgcttaatgcactgccagaatacgtggagtgatgaagacaaccagttcacgtcgttcgttatccttaccgtcacggcgaaataactgaccaagccaggggatgtcgctaaggagaggaataccatcgcgagacgttttatttttctgcgcaaagatcccgcctaacgccagggtctcgccgcttttcatttcaacctgcgtttctatttcttgtttatcgatagccagcgcttcaccattttcctgtttgagcacctggcccggcgtattttcgctaatcctgagttttaaacgcacgcgatcgtgatgcagcaccgtcggcgtcacctccatccccagcaccgcctctttaaactcaacggaggtcgccccgctttcgccgctggagacctgataaggtatctcgctgccctgcttaatgctggcgggctgcatatgggaagccaacagccgagggctggcgataatgtccacctgctgcttctgctcaagcgcggaaagttccagctccagaagccgcccgctgatgcggccgatgttaaacccggccctcgtgctggcatcccctaccgccaggttgctgctcaaggtggttaatttaccggagcccggcgggctgctggcgtcggccaggctccacttaacgcccagttcgcgcaggctggtttcgctcattgagacgatgtgcgccgccagctcaacctggccgacgggcacatccatctcccgggcccacgcttttaacgccgggaggtgccgggcatcatcacgaatcaacaggcggttggttcgcttatcgaccatcatatgcccgcgagcgctcagcagtttttcacccgccttcgctaaatcttctgcatccgcataatgcaaggtcacgctatacccctgcaaaggaagattctgcagacgctttgctttttccgcttccagcagcagctgctgcgccttttgccacgcctgagtgtgcacgtacaggaccgaaccttgctgagtcagggccagaccggcgctgtcgataaccgagcgcagcgcctgtaaccagggcacctccttcagatgaagagataccgtaccgctgacgtcaggagccaccacgagatttttttgcttcagctccgccagcgtttgcagtacctgggacaccggcgcatcatcgacgaccagcgacacgggaagatcctttttggccgcgacgaccatcagcggcaggagcagaaacagcaggcttgtccatcgcatcattctttattccctttcgcagccagacccactgtgcgggttcacacccaggaccggttgatattgtcatttcctctggcgtcaggcgcgtcacccgccagcccgtgggcaaaatagcctccgccctcacgcggcgccatttcccggcgctatcctgcacgatacccataagcgccagcgaatcgccgatagcaccgccgtagcgccactggctaagctgcgccgtccggcagcggtccaccgggggctggaacggatcgcgctcttcagccagcagcgggagcgggaacagcagccaacaccaccatttaaggcgcatcttccgcctccagatgcagggtcaaccgtaacgcctgcttttccggctgcagggagaaagccgtagcgcgcatcccgcagcgagccagccaggaaaagagcgcgggcaccgcttgccagtcaaccgccagctgcatctcgcctgcggagccccctggccgccaggcgataagcgtcgccccggcaataggaagatcaataggcgtaaaaacctgggtcgcgtcttccgccatcccggcggtctgtaaagcgctactcagcggcagcagttttcgccactgcgcctgtacctgcggcgagcgcccggccgacgtttctgcctggagaggcagcagtagccagaacccgattacggcgatgaggaccagagcgacggatatcatgaacagatatttgcgccccgtcagccaacgttcaacgtcccactgcattgtcgtcctcttcggccatggaaaagtgaaataaccagcgcccttcgctgtcgcggtgcgtttctcccgcctttggcggacgcaggccggcaacgctccccagcgccttttcaagctcagccagcccctttagatgcaacgtgagtccgctcagtaccagggtattctgtcggtattccagcagcgttaaccaggcgtgctccggcatacgcgacgctatcgcctgtaacgttggctgccaggcggcggttctctcgcgccgcagatagcgcaggcgccgttgttcctgctgctgcaggcgctggcgcatggcgcgttcacgctgctgtaatgcgctataaagcaggtcgtcagcgcttatcctcgccgtttcaagcgagtggctggcccgtttgttgagccgtgaggcgaggatcgccgcaagcagaataagtagcaaacccacaatcagcagtcctgccatccgcagacgttgccgtcgacgcgtttcgcgccagggaaggaagttaacgatgtggctcatggctgacccgctcccagcgccaggccgagggcaacggtaaagctatcgccacgggccgggagcgggggctgcaggcgatgaatggcgctccatgcgtcaaaattctgcccgtcgagcgaggcagaggtgcaaaggcgaaactctccggcgttcacccgggaaaccaggccgggaaaagagggaacgtcgctgcacggacagcatccccagctatcggcggtcgcccaaagccagctcgtttcgtcacgccacgccagcccctgaacctcgacgggcagccaggggaaaaaggcgccaagcgcgctggcgtccggcacaattccgaccaccttcagcttaaggcggcttgccagctggccgagggcgttaatatccaggcgctgcgcggcggtgacccgccagccatcggccgctctggcgtccacataatcgacgcagagcgatgacgcgggcatttccagctgctgcgccatcgcgctggcgatccaggtcgcctgctcgctttctcgtaatgaaatctgcgggcgcggaagctgcttttgcagcgttcgcgccgccgggaaggcaatacacgcctgatgctgcaaaggcagctcccgccgccagggctgcagctggcgggccagcgactcaacgtccaccacgatgccctgccgcacggtgccgggaatcagcgggatacgccaccagcgacgtagcgcccagcgtgaacgctcgagtaataacgcgacgatagcaatatggtcctgctgaatatgcattcctatgcgccagtttctaaaagccatgcctacgatctccttatccgccgatatgcttcgctatatcaatgctccaggcttgcctttatactactgcgcgtttgtttataaactgcccaatgaaaactaaatgagaaatctccggtgaagttcgtaaagtatctttttatccttgcagtctgttgcgtactgctgggagcaggctcgatttttggtctctataaatatatagagccgcagctccccgacgtcgcaaccctgaaggatgtgcgcctgcagatcccgatgcaggtctatagcgcggatggcgagctgattgcgcaatatggcgaaaaacgccgtattcccgtcacgctgcagcaaatgccgcctgagctgataaaagcgtttatcgccaccgaagatagccgtttttatgagcatcatggcgttgacccggtcgggattttccgcgcggccagcgtcgcgatgttctccggccacgcctcgcagggcgccagtacgattactcagcagctggcgcgcaacttcttcctgagccctgagaagacgctgatgcgtaaggtgaaagaagccttcctcgcgatccgcatcgagcagttgctcaataaagatgaaatccttgagctgtacctgaacaaaatctatcttggctaccgcgcctacggcgtcggcgcggccgcgcaggtctattttgggaaatccgtcgaccagcttacgctgagcgaaatggcggtcattgcgggcctgcctaaagcgccgtcgacgtttaacccgctctactccatggatcgcgcaaccgcccgccgcaacgttgttctctcacggatgctgagcgaaggctacatcacgcagtcgcagtacgatcaggcgcgtagccagacgattgacgccagctaccatacgccggaaatcgccttctcctccccgtatcttagcgaaatggtgcgtcaggaaatggtcagccgctacggcgagcaggcttatgaagacggttatcgcgtctacaccaccattacccgtaaaaatcagcaggccgcccagcaggcggtgcggaataacgtgctggattacgacatgcgccacggctatcgcggcccggaaaaggtgctgtggaaggtgggcgaaacgccgtgggataaccagaaaatcctcgaaaccctgaaaaaaaccccgagtaccggaccgctctctccggcggtagtcacttcggcaagcccgcaggaagccgtcgcactcatgagcaacggcacctcggtgtcgctgaatatggaaggcgtccgctgggcgcgtcggtttatctctgatacccaacagggcgccacgccgcgtaaagtgaacgatgtggtgcaggccgggcagcaggtgtgggtccgccaggtgggtagcagctggtggctatcgcaggtgcctgatgtcaactcggcgctggtatcgatcaacccgcaaaacggggcgatcattgcgctggtcggcggcttcgatttcaaccagagcaagttcaaccgcgcgactcaggcgctgcgccaggtcggttctaacattaagccgttcctctacacagcggcaatggataaaggcttaacgctggcgagcatgctcaacgatgtgccgatttcccgctgggatgccggctccggctccgactggcggccaaaaaactccccgccgcagtatgcgggccctatccgcctgcgtcaggggctgggtcaatcaaagaacgttgtcatggttcgcgcgatgcgcgccatgggtgtggactacgcggcagagtatcttcagcgcttcggcttcccggcgcagaacatcgtgcggacagaatcgctggcgctgggctccgcgtctttcaccccgcttcaggttgctcgcggctattcggtgatggctaacggcggtttcctggtcagcccttatttcatcagcaaaatcgagaacgatcagggcggcgtcatttttgaagagcggccaaaaattgcctgcccgcagtgcaatattccggtgatttatggcgatacgccgaagtccgatgtgctcgagaacaaagacgttgaggacgtagcgacctctcaggacccgcaaaaccccggcgttcctccgcagccgcagctggcgcaggcgaaccagtcgctggtggcgcaaagtggcgcacccgagtatgcgccgcacgtgatcaacaccccgctggcgttcctgattaaaagcgccctgaacactaatattttcggcgaaccgggctggatgggcaccggctggcgagcggggcgcgatctgcagcgtcacgatatcggcggcaaaaccgggaccaccaacagttcaaaagatgcgtggttctcgggctacggccctggcgtggtgacgtcggtatggattggcttcgatgaccaccgtcgcgaccttggccgcaccaccgcctccggggcaatcaaagatcagatatcgggctatgaaggcggcgccaaaagcgctcagccggcctgggatgactttatgaaaaacgtgctgcaaggcgtaccggaagaaccgcttacgccgccgccgggtattattacggtcaacattgaccgcagtaccggtcagttggccagcggcggtaacagccgcgctgagtactttattgagggcactcagcctacccagcaggcggttcatgaagtcggcaccaccattaccgatggcgggggggaaacccacgaactgttctgacaaaaaaagcgcctgcgggcgcttttttttggctgacggaaaaccggttgtagatatcgtgccacggctggcgcctttaccacgacctaccgcaacggctccgtaaggcccgccgtggggcatttttcgttatccgggagtgacgctacagccgcccctgcgcctgcagccattcgcgcagcaggaacagcgcgctaacgttacgcgcttcgttaaagtcttcttcatcaagcagcgtcatcagctgcgacagcggccagcgaacctggggcagcggctcgggctcgtcgccgggcagcgattccggataaagatcttccgccaccagaatgttcatcttgctggagaagtaggagggggccatgctcagctttttcaaaaacgtcagtttttgcgcgccaaagccgacctcttcttttagctcgcggttggcggcctccagtacgctttcacccggatcgatcaggccttttgagaagcccagctcataggattccgtaccgacagcgtattcgcgaatcaagattatatggtcatcgacaatcggcacaatcatcacggcttcacgggtagaaggccgcatccgttcatacactcggcgcacgccgttgctgaactcgaggtccacgctttcaacattaaaaaggcgcgagcgcgcgactgtttcaacgttgagaatagtgggtttttgtaatgatttgctcattgtcatcggtctatgctgtgattacagcggccattgtgcgatacgcagcacggtttcggcaatcctaatcgctactaatttacatagttgcaactttcccgtcccgagcccgattatcacaatgactaaaaagtcaataggttgaatagtatttgagaatatactgattcctggattttaacgtttttgataaggttgtatgctgctgctttgcataagagatgttcccgctttaacagagtgccgattgcgacggctgttttacctccattgatgaatggcaaccgacgataccagtaagaaaagaataactatgatgggatgggcatgggcacctttctgatatttttgatagctctgctaatctgcgcattgcttatcgggtggtggtatcgcacgcatgcaagacgtcgtcgcctgccgctgctgcaggcctttagcgatgccgcgacgcgcaagctttccgatgaagagcgcagcgccgtagaaaaatacctcgaccgtctcagccgcaaccagcagctgccggcatcaggcgccatcagcgcgccggtaaacctgaccctgaacgaacagagcggcaccgtttatagcgtcacccgagccatcactcgctacggcatcaccaccgacgagctcaacaaatggcgctacttccttgattccgttgaaattcatcttcctcccttctgggaacaacacatcaatgatgaaaacagcgtcgaattaatctccaccgatagcctgccgctggtgattgctctcaacgggcaaaccctcagcgactacccgcacgagtcccgagggttggcgcttgaaaaatcctccgtgcctcaggcttccatccgcggagaagagagcgaacaaattgagctgctgaacatccgcccggaaacccctgaagagcacgcgctcagccgccctgacggtctgcgcgaagccatcctggtggtcaccgctttcctgctgttttattgcagcctaatgactcccaacgttttttccccctggctactgggcggcgggttgcttctcctgcttgcgggcatatggggtatttacgcccccccacgtaaaacatcgctgcgggaaattcactgcctgcgcggcatgcctaaacgctgggggctgtttggtgaaaacgaccaggaacatatcaataatatttccctcggcattatcgatcttatctacccgcgccactggcagccgtggatcgcgcaggacctcggccaacaaacggatatcgacatctatcttagccgccacgttgtccgccaggggcgcttcctgtcgctgcatgatgaggtcaaaaacttcccgcttcagtactggctccgcagcgcgattatcgccctgggcgcgctgctggtcgtcgtgatgctgtgggccagcgtaccgctgaatatgccctttaaattcaccctttcatggctcaagggcgcacaaactatcgaagccacgacggttgcccagctggagaagtcaaagattcgcatcggcgacacgctgcgcctgaaaggcactggaatgtgcaacatccactcgccgggcgcctggacggcaaaagagaactcgtcgtttatgccgttcgattgttcacaaatcgtctggaatgatgcccctcccctgccgctgccggagtcagatatcgtcagtaaggccaccgccctgatgcagaccgttcagcgccagctccatcccgaatctgatgacgattcgcgcgtcagcccggcgctgcgttccgccattcagaagtcaggcatggtgctgctggatgactttggcgatatcgtcaccaaaactaacgacctgtgctctgcgaaagacgattgcgttcgtttgaagaatgcgctggttaacctcggtaatacccgcaactgggaaaccctgaccaaacgcgcaaacgcgggcaagctggatggggtcaacgtcctgttacgcccggtaagcgcggagtcgctggagaatctggtcaccacctccaccgccccgttcatcagccgtgaaacctcgcgcgcggcgcaggcgctgaatagcccggcgcccggcggtttcctgattgccagcgatgaaggcagcgacctggtgaatcagccatggccaggcaccgggttatacgacttccctgcacaccagcagtggagcgaactgcagcgcctggcgggcatgttaatgcacacgccgttccaggcagaaggcatcgtcaccaatctttataccgatgccaacgggacgcagcacatcaacctgcatcgtattcccgatcgcaccggtctgtggcgctatctcggcaccacgctgctgctgctgaccatgctgggctgtacggcgtatcacggcctccaggcttttcgtcgctatcagcgccatcgccagcgtcaggaagagattcagaaatactacgaaagctgcctgaatccggatctcctttcctcaccggaaccgcaagaataattctctgcgcgaccgggtatgataccctgtcgcgcaattttccccctcgctggagacccaccatgcattttgatatcgcctggcaggaggttgataccgttctgctggatatggacggcacgctgctcgacctcgccttcgacaactacttctggcaaaaactggtgccggaaacctggggcgccgcgcggggtctcaacctgcaggaagccagggacgcaatgcgccaggagtaccacgcggtgcaacatacgctaaactggtactgcctggactactggagcgagcgccttggtttggatatttgtgcgatgaccagcgagcaggggccaagggccgcgctgcgtgaagataccgtgccgttcctcgaggcgctaaaaaacagcggcaaacggcggattttgctgaccaacgcccatccgcataatctggcggtgaagctaaagcacaccgggctggatgcacaccttgatttattgctttccacccacacatttggttatccgaaagaagatcagcggctgtggcacgccgtggctgaagaaaccggcttcgacgcgcgtaatacgctcttcgtcgacgataacgaggcgattctggacgcggcggcggagtacggcatccgctattgcctcggtatcaccaaccccgactccgggctggcggaaaaaagctacgctcgccatccggggttgaatgactaccggcatctgatcccctcgctgaccctacaggagaggccatgaaagaaaaacccgtcgaagccgtcaggctggacaaatggctgtgggcagcccgcatttataaaacccgtgcgctggcgcgcgagatgattgaaggcggcaaggtgcactataacggacaacgcagtaagccgggcaaagtggtcgagctgaacgcgaccctgctgcttcgccagggcaatgacgaacgaaccatcgtggtaaagggcattaccgaacagcgcagacccgccagtgaagccgtcgcgctttatgaagagacggcggagagcatcgagaaacgcgagaaaatggcgctggcgcggaagatgaacgcgttaaccatgccgcatcccgacaggcgaccggataagaaagagcgccgcgacctgatgagatttaaacacggcgatagtgaataactgtggcccgcaagagagatgattatgactcaacacgatcaattacaccgctatctgtttgaaaactatgccgtacgcggtgagctggtaaccgtttcagaaactttagaacagattctgaccaaccatagctacccgcagccggtgaaaaccgtgctggcggaactgctggttgccaccagcctgctgaccgccacgctgaagttcgccggcgatattaccgttcagctgcagggcgatggcccgctgtcgctggcggtgatcaacggcaacaaccagcagcagatgcgcggtgtagcccgcgtccagggcgagctcccggaaggggcggacctgaaaaccatggtcggtaacggatatctggtcattaccatctctccggaagagggcgaacgctatcagggcgtggtcggtctcgagggggatacccttgcggcctgcctcgaagattacttccagcgctccgaacagctgccgacccgactgatcattcgtagcggtgaacacgacggtaaaccgatggccggcggcatgctgctgcaggttctgccggcgcaggacgcacaggcggcggatttcgaacatctgagcaccctgactgagaccatcaaagctgaagagctgtttaccctgccagcgaacgatgtgctctggcgcttgtatcacgaagaagaagtcaccgtttacgagccgcagaacgtcgagtttaagtgcacctgctctcgcgagcgctgcgccggcgcgctgaaaacgctgccggatgaggagatcgatagcatcctggccgatgaaggtgaaatcgatatgcactgcgactactgcggtaatcactacatctttaatgcgatggatattgccgaaattcgtaacaacgcctccccggccgacccgcagctccactaatcatcgcttcgccaggcgcggtttcccttttcgcgcctggcgtcaacgctttttctgcgcgtggtgaatcgattccccatgaaagagttacgtaattttctttcaggtaagcgattacattcacatttcaacagtttttttaattactttttaaccattaagaaacatctacccccaactatgccctaattcctgagataatcccctacgcctcgtgacaggagtcacaacgtttttcgtaagtccgccgtttgtcgagatacgtaaatctatgagcctggtcgcggtctataccccgtaataaaccctacaatttaaagcagtacatattggctaaggagcagtgacatgcgcgttaataatggtttaaccccgcaggatctcaaggcttatggtatcaatgacgtccaggatatcgttcataaccccagctacgatactttgtatgaagaagagctcgcccccaatctggaaggctatgaacgtggcgtattaacaaatcttggtgcaatcgccgtagataccggtatttttaccggccgttctccaaaagataagtatatcgttcgtgatgacaccacccgcgatacggtgtggtgggctgataaaggcaaaggcaagaacgacaacaagccgctctctgaggaaacgtggcagcacctgaaggggctggtgacccgccagctctccggcaagcgtctgtttatcgttgacgccttctgcggcgccaacgccgacacccgcctgagcgtccgctttattaccgaagtcgcctggcaggcgcatttcgtgaagaacatgtttatccgaccaggcgatgaagagctggcaaacttcaaaccggacttcatcgtgatgaacggcgccaagtgcaccaacccgcagtggaaagaacagggtctgaactccgagaacttcgtcgcgttcaacctgaccgagcgcattcagctcatcggcggcacctggtacggcggcgaaatgaaaaaagggatgttctcgatcatgaactacctgctgccgctgaagggcatcgcctccatgcactgctccgccaacgtaggggaaaaagaggatgtcgccatcttcttcggcctttccggtaccggcaagaccaccctctctaccgatccgaaacgccgtctgattggcgatgacgaacacggctgggatgacgacggggtcttcaacttcgaaggcggctgctacgccaagaccattaagctttccgaagccgcagagccggatatctaccatgcgattcgccgcgatgcgctgctggagaacgtggtggtgctggccgacggcaccgtcgattttaacgacggttcgaagaccgaaaacacccgcgtctcttatccgatcaaccatatcgagaacatcgttaagccgatctctaaggccggtcatgccaccaaggttatcttcctgaccgccgacgcctttggcgtcctgccgccggtttctcgcctgaccgccgaccagacccagtaccatttcttgtctggcttcaccgccaaactggcgggtaccgagcgcggcgtcacggagccgacgccaaccttctccgcctgcttcggcgcggcgttcctgtcgctgcacccgacgcagtacgcggaagtgctggtgaagcgcatgcaggcgtccggcgcgcaggcctatctggtcaacaccggctggaacggtaccggtaaacgtatctctatcaaagatactcgcgccattatcgacgcaattcttgatggttcgctggacaacgccgaaaccttcactctgccgatgtttgagctgcagatcccgaccgagcttcccggcgtggatacccatatccttgacccgcgcaacacctacggatcgccggagcagtggcaggagaaagcggaacagctggcgaagctgtttatcgagaacttcgagaagtacaccgatacgccggcgggcgctgcgctggtggccgcggggccgaaacgctaatcgggtccgcagaaatgaaaaagccgggaatcgcttcccggcttttttatcgcgttgacatcacgctggcttcttcttactcgccgccttgcgccgcttatccagatccttaagcagcttattcacctgctcatcggcaaacatcgcctcgagcgtggtggagagcttgcgacgccagtttggatactccgtgctggtgcccggaatattgaccggctcggccatctccagccagtcttccggctgcaggcccagcagggcgctgttgctgtcggcaatatagcgctgcattccacgattgagggtcgacgtcatcgccatcagcgacgctttgtgcccggtacgcttcggcagacagccgtagcggtgcagagcgtccagcagcccctgcttcgcccgctcgcggtcctgatacagtccgcgcagtaccaccgcatccggatacaggccaagcgatttacccagcgtcaggtcgccgctttcccagtagccgcgcagcgttggcaggtcatgcgtcgtagccacagccattgattgctccggatacgccttcggcgcacggaaagtcttctcgtggtcattttcgaaatagagcactttgtaagagtaaacgccgcttttacgcagcttaccgacgatctctaccggtacggttcccagatcctcgccgatcaccatacagcgatgacgcttactctccagcgccagaatcgacaacagatcgtcgaccggatactgcacataggcgccgtgatcggccgtttcaccgtaagggatccaccacaaacgcagcaccgacatcacgtgatcgatgcgcagcgccccgcagttttgcatgttggcgcgcagcagttcgacaaacggctcataggcgcgcgccacgatgatatgcggatccatcggcggcaggccccagttttgtcccagcgggcccaggatatccggcggcgcgccgacggaagctttcaggcagtacagctcgcgatcgcaccaggtttccgccccgccttccgcaacgcccaccgccaggtcgcgatacaggccgatcggcatggcgtcgttctggctggtatgccagcattcggcaaactgagtgaaagcgagccactgcagccacaggtaaaaattcacctcatcggcgtgttcggtgcagaacgctttaacctccgggctatcggtatcctgataagccttcggccacgcgggccagccccagcgcagcggatcctgcttaacctgccaggcgtgcagcgcgtcaaacgccgcctgccagtacaggctttccccctcgcgcgccacaaactgacggaactccgccgtcgtctcatcgttacgtgcggaaaaacctttccaggccatgcgcagcgcagtgagcttaagggcggtcacggcggtatagtcaacatcatcggtctgacgcgcggcctgtagggcctgctgcgtagccggtgattgccaccatttctgcgcttctttgctgtgtcggaaatcctctaccgcattgacgtctatatagataacgttgagccagcggcgcgaagaggggctgtacggactggcgctctccggattagccggatagagcgcgtgaatcgggttaagcccgataaacgcaccgccgcggcgggcgatttccggcagcatcgcgcgtaaatcgccgaagtcgccaatcccccagttcttctccgagcgcagcgtatacagctgtacgcaggttccccacagcttcttgccatccttcagcgcctgcggttcgtagcagcgcgcgggcgcgacgatgacccggcagtgccagcggtcgccgtcctgagtcagcgtcagcgtgtggtacccttccggcaatcttgccggcagcggcagcgtttcaccgccgcgcgcctggccctgatactgtttcccttcttcggtggtgaggatccagtggaactccccctggcccgccaccggcagagacatctttttgccgtaggtgaacacctgcaccgcaggcagcgggttaaccgccgccttcacggcgctcgctgtacgatgcatcgcatcaagcagccgctgcttggtcaccgcagcaatggactgcggctttccatgagcgttgatgtagcttgggcttattcccgccgccagggcagcgttatcaaggcgtttagtctccataggcctgtccttagcgttttgcctgccagatacgttgctgataatcgcgaatcgagcggtcggagctgaacatgccgcagcgcgcggtgttcaggatcgctgcgcgcgtccaggcctcctggtcgcgatacagcgcatcaacctgcttctgcgccgccacgtaggcttcaaaatccgccagcaccaggtacggatcgccgcctttcagcaggctatgcagcatctggtcaaaggcatgcttatcgccatcgctatatttgccgctctccagctctttcagcaccgcgtccagcagcttgtctttcttacgccatttcagcggatcgtagcctttggccttcagcgctttcacttcttccacggtatgaccgaagataaagatgttttcgtcacccacctgctcagcgatttccacgttcgccccgtccagggttcccacggtcagcgcgccgttcagcgccagcttcatattgccggtaccggaggcctctttacccgccgtagagatctgctcggagacatccgccgccgggatcagcatttccgccgccgagacgcagtagtccggcaggaataccactttcagcttatcgccaaccagcggatcgttattgatcgctgcggcaaccttgttgatcgcccagataatattcttcgccaggtagtagcccggcgccgctttcgcaccgaacaggaacacgcgcggtacgcggtccgtctgcgggttctcgcggatttctttgtactgcgcgaggatgttcagcaggttgaggtgctgacgtttgtactcgtgcagacgtttaatctggatatcgaaaatcgcctgcggattaatctcgataccggtacgccgcttcacaaactccgccagacgaaccttgttggccagcttaatgtcgcgatacgtctgacggaacttagcgtcatcggcatatttttcgaggttgatcagctggtcgagatcgttggcccactctttcttcagggttttatccagcagcgcggccagagccgggttgcactgtttgatccagcggcgcggggtaataccgttggtgacgttatggaatttattcggccacagctggtgatattccgggaacagatctttcaccaccaggtcggagtgcagcgcggcaacgccgttaaccgcaaagccgctcaccacgcacatgttcgccatgcgaacctgtttatcgtgcaccaccgccagtttcgcccatacctgcttatcgcccggccaggttttatccaccagcgttttaaagcggtcgttaatctgtttgatgatctgcatgtggcgcggcagcagcgctttcaccagcttctcatcccagcactccagcgcttccggcatcagggtgtggttggtatacgcgaaggttttgctggtaatcgcccaggcgtcgtcccagctcagctgatgctcatcaatcagcacgcgcagcagttccggaatcgcaatcgtcgggtgagtatcgttaagctggatgacttcataatccgctagctccgccagcttgcggcccgccagatgatggcgacgcagaatatcggcaaccgagcaggcgcactggaagtactgctgcatcagacgcagttttttacccgcctgatggttatcgttcgggtagagaactttcgtcagtttttcggcgtcaatgccctgctgttcggcacgcaggaaatcgccgtcgttgaatttggtcaggttaaacggatgcgcgtgcttagcctgccacaggcgcagcggctgagccacgttgttgcggtagcccagcaccggcagatcccaggcttcgccggtaatcacgaatgccggtacccactcaccgcttttggtcactttaccgccgaggccaacctgcacgtccagcgcttcgttgtggcggaaccacgggtagctattacgcccccagtcatccggcgcttccatctgctggccgtcagcgaaagactggcggaacagaccgtactggtagttcaggccgtagccggtcgccgactggccaacggtagccattgaatcaaggaaacaagccgccagacggccaagaccgccgttgcccagacccgggtcgatttcctcttccagcaggtcggtcaaattaatgtcgtgcgcctgaagctcatcgctgacctgctgataccagccaaggttaagcaggttgttgccggtcaggcgaccgatcaaaaactccatggagatatagtttacgtggcgctgcccttcggccgctttcgctaccggctgagccgacaacagctcggacagcgcaccgctaacggcgcgccaccactgacgctgggtcatctcggaagcggactgtaaaccaaaatgctgccactgacgcgtcagtgcagcctgaaactgagctttgttaaaagaagtctgtgacataagtaatccgggtcctttactaaaacgttagcgttagtgtgccgacctcccggagtcacgtcctcatcccgccagggattagccggggaggagtagcagggatgagcgaaaagtgtgatcgtggccactattacgttagcctaccggccaaaattatgctgcaaaattcgccataccggaacaacaaaccggcccgcctggcgctcaaaattttgttacaagccaggacgataaaagcaagcgaaacgccgttgtgtaaatatcgacaaataaaagtaaatatcaggggaataaacgtactttaatgtagaaatagctcaaaaggatgacttataagatttcgctgataatattttattaaaaacaaacagctactaattttgtaataaaacattagcttattgtgtctgtaacctgcgcaatcccaacaaccgcgcacgctgacgcggatttctttgaatttatctctatgtccaaatttgtgacatagagcaaattcaagagcataaaactcggacataacttgcaataaaattcattatggccgaccttattggatattaattacgaagcgcaaaaaaattcgcaactcctcccttgcacagcgaaatgaagaactatgttgattccgtctaaattaagtcgcccggtccgccttgaacacactgtggttcgtgagcgattgctggcgaaactttccggcgcgaacaattatcgtctcgcgttggtgaccagcccggctggctacggtaagaccacgctcgtgtctcaatgggcggcggggaaaaacgatctcggctggttctccctggatgaaggcgataaccaacaggagcgttttgccagctatcttatcgccgccgttcaacaggcaaccggcggccactgcgcggccagcgaagcgatggtgcaaaaacgccagtacgccagcctgccttccctcttcgcacaactgtttattgaactggccgactggcagcgcccgctgttcctggtgattgatgattaccatctgatcagcaatccggtgattcatgacgcaatgcgtttcttcctccgccatcagccagaaaatatgacgctggtggtgctgtcgcgtaatctgccgcagctgggtatcgccaacctgcgcgtgcgcgatcagctgctggaaatcggcagccagcagctggcttttacccatcaggaagccaagcagtttttcgactgtcgtctcagttcgcccattgaggccgacgacagcaaaaggctgtgcgacgatgttgccggctgggccaccgcgctacagctgattgccctctcggcgcgccagaacaatacttccgcccaccactccgctcgtcgtcttgccggcattaacgccagccatctttctgactacctggtcgatgaggtgctggacaacgtggacccgcggacgcgtaatttcctgctgaaaagttcgctactgcgttcaatgaacgatgcgctcatcgtccgcgttaccggcgaagagaatggccagatgcagctggaagaaattgaacgtcagggcttattcctgcagcggatggacgattccggcgaatggttccgctaccatccgctgttcggcaacttcctgcgccagcgctgccagtgggagctggcggttgagctaccggaaattcaccgtgcggcggcagaaagctggatggcgcaaggcttcccgagcgaagccattcatcacgccctggccgcgggtgacgccaaaatgctgcgcgatattctgctcaaccacgcgtggggcatgtttaaccacagcgaactgagtttgctggagcagtccctcgccgcgctgccgtggtcaaacctgctggaaaacccgcgtttaattcttttgcaggcctggctgatgcagagccagcaccgctatagcgaagtgaataccctgctggcgcgcgccgagcaggagatggatacggaaatggacaccgccatgcacggggatttcaacgccctgcgcgcccaggtggcgatcaacgcgggcgatcaggacgaagccgagcgcctggcgatggtggcccttgatgaactgccgctggccagctactacagccgtatcgttgccacatccgtacacggtgaagttctgcactgcaaaggccagctgagcaaatcgctggcggtcatgcagcagacggaacagatggcccgccgtcatgacgtctggcactacgcgttatggagcatgatccagcaaagcgaaatcctctttgcgcaggggttcctgcaggccgcctgggaaattcaggaaaaagcgttccagctgattcgcgaacagcaccttgagcagctgccgatgcacgagttcctgctgcggattcgctcccagctgctgtgggcctgggcgcggctggatgaagcggagacctccgcgcgcagcggcatgaacgtgctttcctcctatcagccgcagcagcagctgcagtgcctgacgctgatggtacagtgctcgctggcgcggggcgacctggataacgcccgcagccatttgaatcgcctggaaaacctgcttggcaacggccattaccatagcgactgggtatccaatgccgacaaagtccgggtgatctactggcagatgatcggcgataaagccgccgcggcaaactggctgcgccagacgccaaaaccggaattcgctaacaaccatttcctgcagagccagtggcgcaatatcgcccgcgcgcagatcctgctcggcgattttgattccgccgaaatggtgctggaagagctaaacgataacgcccgctcgctgcgtttgatgagcgacctgaaccgcaacctgctgctgctcaaccagctctactggcaggccgggcgtaagagcgaagcgcaaaaagcgctgctggaagcgctcaccctcgctaaccgcaccgggtttattaatcattttgtcattgaaggcgaagcgatggcgcagcagctgcgccagctgattcagctcaatacgctgccggagctggagcagcaccgcgcccagcgtattctgcgcgatatcaaccagcatcatcggcataagttcgcccactttgacgagagcttcgtcgaacggctgctgaaccacccggaagtgccggagcttatccgcaccagcccgctgacccagcgcgaatggcaggtcctgggacttatctattccggctacagcaacgagcagattgccggtgagctggacgtggccgccactacgattaaaacgcatatccgtaacttgtatcagaagctgggcgtggcgcaccgccaggatgccgttcagcatgcccagcagctgttgaaaatgatgggatacggggtttaagccgctatcggctcgcttcaggcaacataaccgttacgtcatcgccggcggcaggtttccctccgcctgacggcggagataatcctgtcactcatcaacaccacgccatcaatcgcgcgcgtcaggcggagcaacgctctggcatgacccggaaatgctaaaggttcagcacagctccagctgaaggttgttatcggtaatcaccttcagtacgccggcgggcggcatcacatcggtatagaccgcatcaaccatgctgatgctgcccatgttgaccatcgcattacggccaaatttagaatggtcaacgaccagcatcacgtggcgggagttttcaataatcgcccgtttggtgcgcacttcgtggtagtcaaactccagcagcgagccatcgctgtcgataccgctgatgccgagaatgccgaaatcaaggcgaaactgggagataaagtccagggtggcctcaccgataataccgccatcccggctgcgcagctcgccgccggccaggataatgcggaagtcctctttcaccatcagcgtattggcgacgttgaggttattggtgacgatgcgcaggtcgttatggttaagcagcgcgtgggccaccgcttccggcgtggtaccgatatcgataaacagcgtcgcgccatcggggatttcgctcgccaccttgcgggcgatgcgctctttttcctgggtctgggtcgattttctgtcgtgccaggacgtattcaccgagctggacggtagcgcagcgccgccgtgatgacgcagaatcattttctgatcggctaaatcattcagatcgcggcgaatggtctgcgggctgacggcaaactgctcgacaagctcttcggtactgacgtatccctgtttttttaccagctcgataatcgcgtcatgacgttgtgtttgtttcatgaaatatccctgggaatctctacgttcgttttcgcacattctgcgtatcaacaaacgccatcgccagcccggtcaccagaccggccacgtgcgcaccgttcgcaatcgacatgccgaaaacatcaaaccatccagcaattaaccatactaaagagaagagtatcaagccgcgctgtaaataaacgccgctctgcggatcgcgctcgccccgtagccagacatagcccattagcgcatagactacgccggagagtccgccaaaccacgggccgctgaactgatgctgcacaaagccgctcagcaaagcggcgatcaccgtaatcaccaccagcttgccgctgccgatgcgcttttctaccgctccgccgaggtaccaccaccatagcaggttgaacagaatatgcatcagcgagaagtgcataagcgcatggctaaagtagcgccagacttcaaatttcagcgaaggatcgtagggccaggccagcagcagcatgaccggttgatcgccaatgaccgtttgcaggacaaagacggcgatgcaggcgaagagcacgccccaggtcaccggcccggcgttatggcgaagcgtcgctaaaaagggaaagcgctggtagtgcagcccgctattggtgtgccccgactgccagctggcggcgaggtaacgcggatcggcgggattttccagaaagcgggccagctcggcctgtacgcgtccggcctgggactcatcagccagccagatatcgctctgcgtatgctgctgaatagtcagaataatgccctgcgtcgccatatagtcgacaaacgcctgggccacgcgcgggttggcaaaagaggtaatcattaacatgcagcggatcgcttattccacacaaagggagatattatagccacaaccggcgctaacgcctaaagtgcgccatgcgcgacttccgccggaaaatgccggtgccaggcatcaaacccgccgtccacgctgtaaaccttgtcgtaaccctgctgcagcagatactgcgcggcgcctttgctgctattgccgtgatagcacatcaccatgaccgccgtatcaaagtcgttgtcgcgcataaacgcgcccagcgtatcgttggtcagatggaatgcgcccggcgtgtggcccatcgcatagctttgcgggtcgcgaatatcgaccagcaccgccgtctgctggtgcattttctggtgggcttcttctacgttaatacattcaaagcgatccataagctctcttctttatatacggatatacaggcaggcggcgaaacgccctggattttagcgtctagtgtacagcctggcgctaaataaacgccaatatgttacacgcatcactctgaaatgtttttttgatgttaccaatagcgcgattgtttgctatattgagcgatatcgaacatttgtgagcttaaacgaaagtgtaagaggtggcgagcgtggaaaccaaagatctgattgtgatagggggaggcatcaacggtgccggtatcgcggcagacgccgcagggcgtggtttatccgtactgatgctggaggcaagcgaccttgcctgcgccacatccagcgccagctcaaagctgattcacggcgggctgcgctaccttgaacactatgagttccgtctggtgagcgaagcgctggccgaacgcgaagtgttgttgaaaatggccccgcatatcgccttcccgatgcgctttcgtttaccgcatcgcccgcatctgcgtccggcgtggatgatccgcattggcctgtttatgtacgatcatctgggcaagcgcaccagcttacccggctcaaccgggttgcgttttggcacagaatcggtacttaaacctgaaatcgtgcgcggtttcgaatattccgactgctgggttgacgatgcgcgtctggtgctggccaatgcccagatggttgtgcgtaaaggcggggaagtgcgcacgcggacccgcgccatctcggcaaaacgtgaaaacggtttgtggattgtcgaagccgaagatattgatagcggcgagaagtttacctggcaggcgcgcggtctggttaacgccaccggcccgtgggtcaaacagttcttcgacgaagggatgcatctgcgctcgccgtacggtattcgcttgatcaagggcagccatatcgtggtgccgcgcgtgcacacgcagaaacaggcctacatcctgcaaaatgaagataaacgcattgtgtttgtgatcccgtggatggatgaattttccatcatcggcaccaccgacgtggagtataaaggcgatccgaaagcggtagcgatcgacgacaacgaagtgaactacctgctgaacgtctataacgcccactttaaaaagcctctcacgcgggacgatatcgtctggacctactccggcgtgcgcccgctgtgcgacgatgaatccgactcgccgcaggcgatcacccgcgattacactcttgatatccatgatgataacgggcaggcgccgctgctgtcggtctttggcggcaagctgaccacctatcgcaagctggccgagcatgcgctggagaaactgacgccttactacaaaggcatcggcccggcatggaccaaaaccgcggtgctgcccggcggcgatatcggcagcgaccgtgacgactacgcggcgaaactgcgccgccgcttttcgtttatcagcgaatcgatggcccgccattacgcccgcacctacggcagcaacagcgagctaatccttgataaggcgacctcactggacgatctgggtgagcatttcggccatgagttttttgaagccgaactgcgctatctggttgagcacgaatgggttcgttcgctggatgacgcgatctggcgtcgcactaaacaaggtatgtggctgaatgacgagcagcaggcgcgcatcagcgagtggctggcgcagcacgcgggaaagtctgagctgtcgctggcgtcgtaacaccgcaaacagtaacggggcctgcgggccccgttttttatggctaatccgttacaaccttaccggatcgatatgccagatatggtcggcatactctttaatagtgcggtcagaagagaagtagcccatattggcgatattcagcatcgctttattggcccactcctccggatgacggtacagctcatccaccttatcctgacaatccacgtagctacggtaatccgccagaacctgatagtggtcgccgaagttaatcagcgaatccagcaggtcacggtagcgtcccggctccgatgggctgaacaggccggtgccgatctgcgtcagcgcctggtgcagctcttcatcctgctcatagtaatcacgcggtttgtagccgttagcccgcagggcttcaacctcttccgccgtattaccgaagataaagaaattatccgccccgacgtgctcctgcatctcaacgttagccccgtccagggtaccgatggttaacgcgccgttaagcgcgaacttcatgttgctggtaccggacgcctccgtccccgccagcgagatctgctcggagagatccgccgccggaatgatcagctgcgcgaggcttacgctgtagttaggaatgaacaccactttcagcttatcgccaacgtccggatcgttattcaccaccgccgcgacgtcattgattaaatgaataatatgcttcgccatgtagtaagccgaagccgccttgccggcgaagatattcacgcgcggtacccactcggcgtcgggatcggccttaatgcgattgtagcgggtgatcacatgcagcacgttcattagctgacgtttgtactcgtgaatacgcttgatctgcacatcgaacagggctttcgggttgaccaccacgttaagctgctggccgatgtagttcgccagccgctgcttgttttccagcttggcctggcgcaccgcctggttaaccttcggatagtcaatatgctgctccagctccttcagctggcttaaatccgtacgccaggtgtggccgatattttcatccagcactttcgacagcggcggattcgccagcgccagccagcggcgcggagtgacgccgttcgtgacgttggtaaagcgcatcgggaagattttggcaaattcggcaaacagcgactcgaccatcagccgggagtgcagctccgacacgccgttgaccttgtggcttaccaccaccgccagccacgccatgcgtacgcgacgcccgttagactcgtcgataatcgacgtacggcccagcatcgccgtatcgttgggatactgctcctgcagggtcttcaggaagtagtcattaatctcgaaaataatctgcaaatgacgcggcaggattttacccagcatatcgacgggccaggtctccagcgcttcgctcatcagggtatggttggtataggagaagacctggcaggtcacctcgaacgcctcatcccagctaaacttatgctcgtcaatcagcaggcgcatcagctccggaatcgacagcaccgggtgcgtgtcgttgaggtgaatcgcgattttgtccgccagattggcgtaggttttatgcagctggtagtgacggctgaggatatcctgtaccgtcgccgacacgaggaaatactcctggcgcaggcgcagctcgcgcccggaataggtggagtcatccggatagagcacccgcgacacgttctcggagtggtttttatcttccaccgccgcgaagtagtcgccctggttgaatttaccgaggttgatctcgctgctggcctgcgcgctccacagacgcagcgtgttggtggcatcggtgtcgaaacccgggatgatctgatcgtaggcttcggcaataatctcttcggtctccacccagcgggaatgtttaccttcctgctgaatgcggccgccgaagcgcactttgtagcgcgtattgtggcgctcgaactcccacgggttgccgtactccagccagtagtccggggactctttctgccgcccgtcgacgatattctgcttaaacatcccgtagtcgtagcgaataccgtagccgcggcccggcaaacccagcgccgccagcgagtcgaggaagcaggcagccagacgaccaagaccgccgttgcccaggcccgggtcgttctcttcgtcaatcagctcttcaagattcagccccatctcttccagcgcgctgttcacgtcctcataaataccgagcgatagcagcgcgttggacaaggtacggccaatcaaaaactccatcgacagatagtaaacctggcgcacttcctgagagagctgcgcccggtttgaacgcagccagcgctcaaccatgcgatcgcgaacggcgaacagcgtggcgttgagccattcatgtttgttagcgatagccggatctttgccgatgataaacatcagcttataagcaatagagtgctttaacgcctcaacgctcagggtgggtgatgagtagctaaaaggtacattcatagctttggctcctggttacagcaagcgttgataaagttcgcggtaagaatttgcggcaacctgccagctaaaatccatattcatcgcctgacgctggacgtagcgccagagcgacgggcgcgaccacaggacgaatgtgcgtcgaatagcccgcagcagcgacaaagcgttgctatcttcaaaaacaaagccggtagccagaccgtcggcgagattctccagcgagcaatcggacacggtgtccgccagtccgccggtacgccgcaccagcggtagcgtgccgtacttcaggccgtacagctgggttaagccgcacggttcaaaacggctgggcaccagaatcacatcggcgccgcccataatgcggtgcgagaaggcttcatggtagccaatctgtacgccgaccttgcccggatgctcggccgcggcggccaggaagccctcctgcagcaccggatcgcccgcccccagcagcgccagctgaccgccctgctccagcaggcccggcagcgcctcaagcaccaggtccagccccttctggctggtcaaacggctgacaacggcaaacagcggcgctttgtcatccaccttcagccccatggcgatttgcagctggcgtttgttttccgctttatcttccagccgatcgcgatcgtagcgcgcggccagcagcaggtcgctttccggattccagatatggtcatccaccccgttgaggatcccggaaaggcggccctcatgctgccgctgacgcagcagcccttccatgccgtaagcgaactgcggctcggtgatttcgcgcgcataggtcgggctgaccgccgtaatatggtcggcgtagtagagccccgccttcagaaaggagatctggccgttaaattcaaggccatgaacgttgtagaacgaccacggcagctcaatgtcgttcatatgccacgagtagaacatcccctggtaggccaggttatgcaccgtaaagaccgacttagccgggtggccgcgcgccgccagataggccggcgtcaggcccgcatgccagtcgtgggcgtgaacaacgtcagggcgccagaaaggatccaggccgcaggccatctcgctaccgacccatcccagcagcgcaaagcgcagcacgttgtcggtataggcgtgctgattggtatcgtggtaagggctccctgggcgatcgtagagatgcggggcatcaatcaaatagatgcccacgccgttaaagtgaccgaacagcaaagtgatgcgcccggcaaacgtctcccggcgcgtcaccacctgcgcatccgtcacgccgcggcggatatcaggaaatgcgggcagcagtacgcgcgtgtcgacgcccccggcaatttgcgctgcaggcagcgcgccgatcacatccgccagtccaccggtttttaacagcgggaacatctctgaacatacatgtaatacctgcattagcgctcctgtggataccccaatttccgcagcatgtcgcgggtgaccagcacgataccttcctccgagcggtagaaacggcgtgcatcctcttccgcgttctccccaacaaccataccttccgggatcacgcaggcgcggtcaataatgcagcgacgcaggcggcacgaacggccaacccaaacctctggcaacaagactgccgaatcaatattacagaatgaattcacccgcacgcgcgggaacagcaccgactgcacaaccaccgaaccggagataatacagccgcctgaaaccagcgagttcagggtcatcccgtggctgcccgagcggtcctggacgaattttgccggaggcaaaggctccatatgggtgcgaatcggccagttctgatcgtacatgtccagttccggggtcaccgaagccagatcgaggttggctttccagtacgcttccagagtcccgacatcacgccagtagggctcagactgcggatcggactgcacgcaggaaagcgggaaaggatgtgcataagccatgccagctttggtgattttcggaatgatgtctttaccaaaatcgtggctggagctttcatcgctgtcgtcttcttccagaagctcataaaggtaatccgcgtcaaagacatagatacccatactcgccagcgatttgctggcatcgcccggcatcgctggcggattagccggtttttcgacgaaatcgataatcttatcgctctcgtccaccgccatgaccccgaacgcccgtgcttcttcaataggcaccggcatacaggccacggtgcaacgcgcgcctttttcgacgtgatcgataagcatgcgcgagtagtcttgtttgtaaatatggtcgcccgcgaggataacgacgtactccgccttgtaacgacgaatgatgtcgaggttctgcgtcaccgcatccgccgtgccgcgataccagttttccccctgcatcctttgctgggcgggcagcaggtcaacaaactcgttcatctcttcattgaagaacgaccagccgcgctggatatgctgcaccagcgtatgcgattgatactgggtgatgacgccgatgcgtcgaatgcctgagttaatacagttagataacgcaaaatcgataatgcggaacttgccgccgaaatggacagcaggtttcgcgcgtttattggtcagatccttcagacgggtaccacgtcccccggcaaggatcagcgcaacggatttgatcggcaactgacgcgccagcatcaatggatcgttcttttctaccccaaccataattaactccttttttactccccagcttgcctgcccttctcgtcgcgccgccgcttcgagaccaaccggaagccccgaggttacgacctttgaaatacgcacactccgtgcgcgggcccatgccagacagctatagtgaccggattatcctctccggcgaaaggtggaatggcgcgccattcccccgcgggtaaaaccatctctgccacctcggcggtggcgttgagcgccatcagccagcgatcggacaatatgatctgcatacgcggcgcaccgtgctgccattcatcggcggacagcggctgcgcatgttggtttaaccagcgaacgctgccgtctccctcctgccaccagcgattctcggttaaagccggaacgcgctggcgcagatgaatcaacgcggcggtgaacgcggtcagcccgcggttagtatggttccagtccagccaggtcaacgcattgtcctgacagtaagcattgttgttgccatgctggctgtgaccgtgttcgtcacccgccagcagcatcggcgttccctgcgccagcagtagcgtcgccagaagagcgtgaacgctggcacggcgccgttcaatcacggcaagactcccttctaatccttctataccattattgttgctgtagttattgttagtcccatcgcgattctcctccccgtttgcctcattatgtttctgattgaaacaaacgcagtcgcgcagggtgaaaccatcgtgcgcggtgaccaggttaaccgccgccgaaggcgctctgccgttacgctgaaaaacgtcgctggatgcggcaaaacgctgagcgaagtcgcccagcgagacgttctgctgcagccagaatcgacgcgcggtatcgcggaaatggtcgttccactcggcgaacagcggcggaaagttacccacctggtagccgcccgggccgatatcccagggttccgcgatcagcttgacctcagccagacgcgggtcgttacggatggcctcaaacagcggcgcatcctgacgaaacgccggcgtccgccccatcaccgaggcgaggtcgaaacgaaagccgtcgacgtggcactcgtcaacccaaaagcgcaggcactggcgggcatactccaccacgccggggtggctgaggttgagggtgttcccgcagccggtccagttgtggtaatcgccgtcttccctgatccaataatagctacggttatcgattccgcgcagggagaaggtcggcccttccaggtctatctccgcgctatggttcagcaccacgtcaaggatcacttcgatgcccgccgcatgtagcgcttttaccgcatcgcgaaactcgtttaacgcctgctccggcgcgctggcgtagcgcgtgtcgagggcgaaaatcgccagcgggttgtagccccaatagttgcttaaccccatccgctgaaggcgcggttcgctggcgaactgcgccaccggcattaactctagtgcagtaatgcccagcatgcggaagtaatcgatcatcaccggatgaccgagcgctttataggtgccgcggatattctccggcagatcggggtgcagatacgtcagccccttgacgtgggcttcataaatcaccgtctggccccacggcgtgcgcggcggcttatcgccgcgccagtcgtaatgcaggtcgatcacccgcgacttcggcgctatcgccgcgctgtcgcgacgatcgggaacgcgatcgccgccgtggagacgttcatcgtcaggcaacccgccgtctacctgatggcagcaggggtcaagcagcagcttcgccgggttgaagcggtgcccttgcgctgggtcccagggcccgtggacgcggtagccgtagcgcaggccaggaccgacatcggcgagccagccgtgccagatatcgccgctgcgcgcgggcaggtcgacgcgtcgctcattgccctgctcgtcaaacacgcagagttccacccgctccgcatgggcggaaaagagcgcgaaattcacgcccttaccgtcgtagctggcccctaaaggcgcgggctttcctgccgtgagtgcgatcattgcgcctcccgcaccagccacaccgtcgccagcggcggcagcgtaatggagagggagtgttcacgaccgtggctggcgatcgggtcgctctcaacgacgccgccgttgccggtgttgctgccgtggtaatgcatggagtcggtgttgagctcttcacgccagcggccgggctggttgatgccaaagcgatactcatgacgcgggaccggggtgaagttgctggcgacgataatttcattgcccgccctgtcgcgacgaacaaagataaataccgaacgctcatggtcgtccaccaccagccattcgaagccgtagggatcgaaatccagctcgtgcagcgctttatggtgacgataggtatggttgaggtcgcgcaccagccgctggacgccgtggtgccagttatcgccgccttccagcagatgccagtcgaggcttgcgtcgtggttccattcgcgcccctgagcaaactcattgcccataaacagcagctttttacccgggaaggcaaacagccagccgtagtaggcgcgcaggttagcgaacttctgccaggcgtcgcccggcatgcggtcgagtatcgattttttgccgtgcaccacttcatcatgagagagcggcaggacaaagttttcggtgtagttgtagagcataccgaaggtcatcttgtcgtgatgatgacggcgatgcaccgggtccagcttcatgtagtcgagggtgtcgtgcatccagccgaggttccacttgaaccagaaacccagcccgccggtggaggaaggacgggaaacgccgggaaaatcggtcgactcttccgccatggttaccgcgcccggcgtctgttcgcccagcacgcggttggtattgcgcagaaactcaatcgcttcaaggttttcccgaccgccgaattcgttcggcacccactcgccctgcttgcggctgtagtcgcgataaatcatcgacgccaccgcatcaacccgcagcgcgtcaatgccgaagcgttcgatccagtacagcgcattgccgaccaggtaattgctgacctcgcggcggccgtagttgtaaatcagggtgttccagtcctgatggtagccttcgcgcgggtcgctatgttcatacagcgaggtgccgtcaaacgaggcgagcgcaaaatcatccgccggaaaatggccaggcacccagtccagaatcacgttcaggcccgcggcgtgcgcggcgttgataaagtagcggaaatcctcccgggtaccgaagcgacgggtgggcgcgtacagcccggtcggctgatagccccagctgccgtcaaacggatgctcgttcaccggcagcagttcgaggtgggtaaagcccatccatttggcatacgggaccagctggtcggcaagctcgcgatagctcagccagaagttattatcggtgtggcggcgccaggagccgaggtgcacttcataaatcgagatcggcgcatcaaactggttagcctgcttgcgctccggcggctgtgcgaccttttccggcagcccgcagatgagcgaggcgctctccggacgcatttgcgcttcaaaagcgtaagggtcggacttcacccgcaggttgccgtgggcatcgataagctcgaatttatacagctggccgttcagcgcgccgggaacaaacagctcccagatgccggactctttacgcaggcgcatcgggtggcggcggccgtcccagtagttaaactgcccgacgaccgatacccggcgggcattcggcgcccatacggagaaacgcgtaccgaccacgccgtccatggtatcggcatgcgcgcccagcgtttcataaggacgcagatgcgtgccttccgacagcagccagacatcgagatcctgcaacagcggaccaaaacggtacgggtcatcaatcaggttctgctgcccgtgccaggtgacggccagctgatagcgaaaaggatttttacgacgcggcagaacgccgctgaagaaaccgcgcgagtcgaggcattccagcttgccgactttgcgtccggtttttggttcaatgacccacacatcggtggcatcgggtaataatgcacgaacttccagcccggcgtcggtgtaatgcatgccaagcacggaaaaaggatccgcaaaatggccggcgataagcgcattaatcacgtccttatcaatacgattagacatggtttcatcctgttgtaggtgtcgccctttcctgtatccggcgacttttttttgacctgaacggcgcagcacgttatgcgtccccctgctccgtcccaccttcaggtaaggagacatcgtgactccttacttaaagcatagccaaggctgagttacctccgttgggaaaaatctaacattcgcgtttactccttgtattacgcaaaaaaaaggggtgtttcaacaccccttttctcatcttgtgacgactacgccagctgtcttagcatgcggcggagcggctcggcggccccccacagcagctggtcaccaacggtgaaggccgacagatactccggccccatgttcagtttacgcaggcgacccaccggggtggtaagggtgccggtaacggcagccggagtcagctcacgcatggtgatatcacgatcgttcggtaccactttggcccacgggttatgcgcggccagcagttcctcaacggtcggaatagaaacatcttttttcagcttgatggtgaacgcctggctatggcagcgcagcgcgccaacgcgaacgcacaggccgtctaccggaatcggtgaggcggtcgcgagaattttgttggtctccgcctggcctttccactcttcacggctctggccgttatccagctgtttgtcgatccatgggatcaggctgcccgccagaggaacgccaaagttgtctaccgccagctcgccgctgcgggtcaacgaggtgaccttgcgttcaatatccaggatcgcggaagccggatccgccagctcagccgcaacatggctgtgcagctggcccatctgggtcagcagctcgcgcatatgccgcgcaccgccgccggaagccgcctgataagtcgccacgctaacccactcaaccagatcctgagcaaacaggccgccgagagacatcagcatcaggctgacggtacagttgccgccgacaaaggttttaacgccgttgttcagacctgcggtgataacgtcctggttcaccgggtcgagaatgatgatggcgtcgtctttcatgcgcagcgaagaggcggcgtcaatccagtagccctgccagccgctttcacgcagcttcgggtaaatatcgttggtgtaatcgccgccctgacacgtgacaataatgtccagcgccttcagtgcttccagatcgaatgcatcctgaagcgtgccaccggtactgccaccaaaagatggagcaggctgccccagctgggaggtggagaaaaaaacagggcgaatggcatcaaaatcgcgctcttcaaccatgcgttgcatgaggacagagccgaccattccgcgccagccgataaaaccaacatttttcataacgtattcctgcgaggtgtgtgctgtttgttccaggccagtttcctactggttagtccttcacattacaaaatgcagctaaagtcgcaagtgaaattaatcaatgattgccaggcaatcagtaacgtaactaattttgcatagcggcagccgtcgctggccccccggaataccctaataattatcagggaatttatatcgcgaaggaaatattttccgccgctattttattgatcaggattatggattacggcagaaattcggttgttttactcttgctaaccaaaccggttaaagccaggcgtggcgcgggtttgtgagccgtatgacgtttatcgtatttctgatagtggcagatcgggagaggggtaaagctaagggttttcgatataagtagagcggaaaaattaacccggcatcgcctcgctccgccgggtgtttcactttgtcttttaactcaatagagtaaacgcaatcatgccgacaatcgccccgacggtgccgaggatggtttccatcatcgtccaggtcttcagcgtttgcgcttcggtcgcgccggtaaacttaccgaacagccagaagcccgcgtcgttaacgtggctgacgacaatagagccgccggcgatgcagatagagagcgccgccatctgcgcgccgctgtagtgcagctgttcgataaccggcatcaccagcccgactgccgtcaggcaggcaacggtcgcggaaccctgaataatacgcaccgccgccgccagcacgaagcaggtgatggcaatcggcaggcccataccggttaacgcttcaccgagggcagggcctacgccggagtcgaccagcacctgtttaaacaccccgcccgcaccgatgaccagcaggatgatgcccgcaggctggagcgcatgaccgcaaatctccatcacccgatctttagccattccctgacgtaccgccagaccatagatagccaccaggcacgccaccagaatcgcggtaaacggatggccgataaactcaaaccattcgtaagcggtagaaccttccggcacaaagcgcgcggcgatggttttcaggccaaccagcaccagcggcagcagaatcagcgacaggctgaagccgaacgacggcattttgccttcgccgaggtgtggctcgctaatatcgtccggaatgtgcagctcaacgtaacggctgatgaagttaccccacagcggcccggcaataatcatccccgggatagcggcgcacaggccaatcaggatcatccagccaaagtcggcgtgcatctgcgaggccagcagcatcggcgcaggccccggtagcaggaacgcggccgcggcggctacgccagcaaacagcgggatcaccagcttcacaaggttggtgccggtatggcgcgccattgagaaagccacgctgatcagcagcacgatcgccacttcaaaaaacagcggcagcgcgcagataagcccggccaggcctatcgcatagtgggcgcgattgtggccgaaagatttcagcatcttaacggcaatctggtcgaccgcgccggtttcatgcaggatcttaccgaacatagcccccagcgcgacgacgatagccagaaagcccagcgtgccgcccatgcctttttccatcgtcgccgcgatcttgtccaacggcattccggaaaaaagccctgctccaatagaaaccaccatcaaagccacgaaggcatgcatacgcgccttcatcactaaaaacagcagcagcaaaacggagccgactgctgttaaaacaagcgttaatgtactcactatttactgcctttgttgatcacctcaatggtgctggcgaccacgccttccaatgactggtcgatatcgacgattaacacatcgctttcatccgcgcccggttcctgcagcgtctcaaactgcgtaaccagcatctgagtcttaaagaagtggcctttacgcgccttcagacgttgttcgataaccgcaaaatcacctttcagatagataaaggagaggttcgggttacctttacgcaggatgtcgcgatagctctttttcaacgcggagcagacaatcagcgacactttattggtgcgctgcatagcaaaggcggcatcgttcagcgcctgcagccacggggtgcggtcgtcatcatttaacggttcgccggaagccatcttgttgatattgctgcgcggatgcagaaagtcgccgtcgagaaacgcggcgtgcagttgatgcgccacttcgctggcgacagcggatttcccgctgccggaaacgcccatcaggacatagatgtggtgatcatggttagtcgtgctcaaagcttcctcccactggacacatacgcgcagcctggcagcgtttaacggcgtggaatactggcgtacaggttaattgttacgggtaactgttatcggtaacattgtcatgccggagttgtggagaagcaataaccattcgtgccagatgtgaatatgtgtgatctacttcaaatttgtcagtttaaatagatccgcccggtgacaatgtgaaacctaaatctaacatcttaggcgtcaccgcttcaccgcgaatacgcgccagcagacgttcagcgccaatccgccccatccgctcgcgcggcgtcagcacgctggccaggcgcggctccatcacctggccgatatcgtggccgtggaaaccggcaatcgccatatcgtcagggattttaagccccagccgctggcactcaaacgccgcgccgaccgcaaggtcatcgttggtacagaaaatgccgtcaagctgcggatattcgcgacgcgcctggcgcatcagctcaatccccgatgaataagaggaagactgctcaaccatcacgctgtagggcgtcattccggcatcaagcatcgcctgctcataccccttctgtttgatgatagtacgttcatcaagacgtgcgccaagataggcaacgtgacgatggccatgattgataatcgccgcggtcatctgccgggccgcttcaaagttatcaaagccgacggcgatatcgaggcacggcgactggctgtccatcagctccacaaccgggatacccgccacttcaatcatcttcagggtgcgcggcgtatgggttcgttcggtaaggatcaggccgtcaatattccaggaaagcatggattccaggcgtttttcttccatttccggcttatagccgtagtgcgccagcatcgtctggtaaccgaaagagtcggtcacgctttcaataccgcgcagcacttctgagaaaacctggttagttaacgagggcagcagcacgccaatagcgcggctggtggcattcgagaggatgtcgggggcgcgattaggaatataacccagttcatcgagagcaacggctatcttgccacgcagcgcttcggaaacctgttccgggttacgtaagtagcgactgaccgtcattttggtcacgccgacaagatcggctacatcctgaagtacgggtcttttctttttcatcgtcctgactgcgatcaacggggaaacattttctcagtttatcacggacaaagcgcaaccttccctaacatcagggaaggttgcgcaatttatttagacccgatcggagaacgatcagacgggcggcagatcgaacagcagaatttcgctatcgccgtcggcgtgtacggaaatcgcctgctcgtcccaaatggccaggccatcgctggtggtggccttcgttccgttgatggtgacttcacctttcaccacctggatccacacccgccgttcagcggcaatctggtgcaccgactgctcgtctttcagcagcgcccagcggtacagttccatatcctggtacaccttcagcgaaccttcgcgggcatccggcgacagcaccagctgcttgccctgcgcggcgtcaaagcggcgctgttcgtagcgcggcgtgatgccatttttttccggcataatccagatctggtacagatgcagtttttccgtgttgcttgggttgtactccgagtgacgaatcccggtacccgcgctcatgatctggaactcacccgccggcacctgctctttattccccatgctgtcctggtgctcaacggccccttccagcacgtaggtcagaatttccatatctttatgcggatgggtaccgaagccctggcctgcatcaatcacgtcgtcattgatcacccgcagcgccgagaagcccatgaagttagggtcgtaatagttagcgaaagagaaagtatgccaggaatccagccagccgtggttagcgtggccgcgttcgttagctttgcgtaagtagatcatgttgcacccccgtatgttttcgatgggataagtgtggacccaatcccctggcgatcatagagggtgaaaattgactcctctgttcaaaaaatatgaacgagtacagaggagccatgagggcttatcgggtaagggtaatcgtggccggagatggctgttcaaagccgcgttcgaggatctccagattcgtgagaacgtcagattccttgacgaaatttgactgaccgttaacgagggtttcatacagcgaatcatagacccgcccatagtcgccggtttcaagcgggatctcttcccgtacggtttcgcccgcctcattgacgtactccagcagaccaaccgtctcgtccgcgccgaatcccggctcgcccggcataatattggccttcaggctggtctcctgctggtcgataccgtatttaataaacgaccctttatgaccatggacgatgaattttggatagggcagcttcaccagatggctggttttgacaatcgccttcaggttgccgtagaacagctgggcctcaaaggtatcgtccggattggccttgttgcgcaggctacggatgtcgtaagagacatggtcagggcgaccgaacagggagataatttggtccagggtatggacgcccaggccgtaaaacgtgccgtcctgaggcaggccgggtttccctccatctaccgggcgatagttgtcaaaatggttttcaatctcgacgatctcgcccagctttccgctctcaatcactttcttcgtggtcaggaagcaggagtcgaagcgacgattctggtacggcgtgaccgtcaatcccttgcttttcgccagggcgaatagcgtttttgcctcatcaagggtcggggtaaagggcttttcgaccagtacatttttgcccgcctccagcgcccttttggcataggcaaaatgactgtccgcgtgggtgcacacaatcaccagcttgacctgcggatcgttaagcacttcgtcgaggtcgctggtgaaatgaatatgcgagtatgccggtgcctgttcctctggctttgcgctgcggcgaaagatatgcgccacgtgccagcggtcttttcggtgcaggacatagggaagatggtagcgggtggtgcttttgccgaatccaataaatgcgcagtgcaaagtcataacgcggtcctttgttaggtctctgctattaaccatagcgcaagctggctgcgaacttaaccccttcaataagtgtgccaaattcttaaatgtaaaatttaacgctcaaattcattgaccctacggcctaaattctggataagagggccctcgggaaaagaacgttttttatccagcgcgtgggagcatgacgccgtatcgcgctcgccgtttcccaaaacacgatgactaaaggagtagccatctcgttcgtatggaaagcaagtatatcgccctgaatagcgcccttctcttttggctgcttggcctgatggcctggtgctgcgaatccacgtatctggcctggctatcgggctctttctccttgtcatctttcgtttttcattttcaatatcatcggattaaccatatgtttaaaaagaataaaaacgttgaagcgacgccacagacggcggctacgccggtactcaacagcgcatccccgttagccgtttcccgcaaacctgccgccacggttatcgccagcggcatccgctttgacggcaatattatcgctgagggagatgtcgatatttacggtaccgtaagcggcaatatcgacgccgaagagagccagattaagattatggccggaggcctggtcgagggaaatatcacctgccgcgagctgattatcgacggctgtatcctcggtcagtgccgcagcgagacgattgaaatcgataagaacggccaggtcaccggtacgttggcctaccgcacgctggccattaacaagggcggcgttttttccggccaggcagagctgctgcctgcggcagaaaagagcaacgtggtggggtttatcgccgataccgctattgaaaccaaagataaggttgaggcgcagtaactgccatccggggcggcggaaaaaagcaaaaaaaaagccagcacccggctggctaaagtaatactggaagcaatgtgagcaatgtcgtgctttcaggctttccgcaagggtctccctgaatgcagagcaataataatcattctcattcgcacttgtccacctctttttgcaaaaaataggcgttgctcccttttttaaagtcagcgatctttaaggggacgattaacccaaaaaggtaaatgaagaatgagcgacatagtgatacgccatgccgaagccaaagattacgacgcaatccatcagatccatgctcagccggaggtatatcacaatacgctacaggttcctcatccttccagccatatgtggcacgagcgactaaccgaccgaccgggcgtcaaacagctggtcgccagcatagatgaccaggtcgtgggacacctcgccattgaggttatccagcgcccgcgccggagccacgtcgccgatttcggcatttgcgtggattcacgatggcacaatcgcggcgttgccagtgagctgattcgcaccatgatcgacatgtgcgacaactggctccgcgttgaccgtattgagttgacggtgtttgtggataacgctcccgcggtggcggtgtatcagaaattaggctttgaaattgaagggacggggagaaagtatgccctgcgcaacggcgaatatgtcgatgcctactttatggcgcggctgaaggggtgacgctcaactaaccctctcccggcagggagagggtcggagtgagggtaaacctaataccctgccgttaaatcatccggggaacgcggatcggatgcgccgtacagcgcgccgtccgggccaaccataatactctgggtgctgcccatcgcctctttcaccgccactttctgccctttgctctccagcagcttcagcgtatccgggctaaatcccttctctacacgcagttcgtccggcagccattgatgatggaagcgcggggcgttggtggcttccgcgacgttcattccgaaatcaatggtattcaccaccatctgcaggacggtggtgatgatgcggctgccgccggggctaccggtcaccagccaggttttgccatctttcaccacaatcgttggcgacatcgacgacagcggacgttttttcggctcgacggcgttggcgtcaccgcccaccagcccgtagacgtttggcacgccgggtttagctgagaaatcatccatctgattattcagcagaatgccggagttccccgccacgatgccggttccaaaggtcgtattcagcgtataggtcacggcaacggcgttaccgtccttatccaccaccgagaaatgagtggtctgattgctttcatacggcgccagcttaccggggcgaatctggctcgacggcttcgccttattgatatcaatctgctcagcaatcgatttggcgtacgctttgctggtcagcacctgccacggcaccttgacgaagtccggatcgccaaggtattccgaacggtcggcataggcgtgcttttcagcttccgccatcacctgcatggcgtcggcgctgccgaagccgtacttatgcatatcgaagttttcgaggatattgaggatctgcacgatatgaatgcccccggacgatgggggcggcattgagaacacctgatagccgcgatactcgccgctcaccggcgtacgttcgaccgctttgtaattggccagatccgctttggtgataagcccgccgttattcttcatctcagcggcaatctggtcggcaatcgcgcctttatagaaggcatccggccccagctcggcaatcagctccaggcttttccccagctgtttttgcaccagcttatcgccctttttcagcggctcgccgtttttccagaagatagcccggctgttggcatggtcggggatcacttcgctgccgtaggttttcaggtcgtcggccagcgcatcatttaccgtgaagccctcttcggccagcttaatcgccgggcgaatcactttgttgagcggcattgtgccgtatttttccagcgcgagggagaacccggcgacggtgcccggcgtgccggaagccagatgcgaggtcagcgatttcttgctgtccgggttgccctgatcgtcgagaaacatatcccgggtggcctgttccggggccatctcgcggaagtcgatcgccgtggtattaccgtctttggtccgcagcatcataaacccgccgccgccgatattaccggcctgcggatgggtgaccgccagcgcgtagcccaccgccacggcggcatcgaccgcgttgccgccctgacgcagaatatccacgcctaccttcgttgccagcgcgtccaccgaggccaccatcccctgctgagcgcggaccgggtgaaatacatcttcctctacgccataagataccggcggaggggcgggatctgccgcgacggtaaaactgccgcccgccagcaacgcagcgatgaccacctgacgccagagcgttgtttttatcattgtcatactcctgaaatgtgttttatccccgtctatacccgtcatactccaggtcgcacggacgttggctacgctcgtttacccgaatcacttacccgagtaagctcatcggccgcattacccggcctgaggcctcgccccttacggggccagcgcaagcgctgttcaaaacggttaaccgttttgtcctgcgactcgaattattcagggtataagcctggctgataagtcctaaaagatcattgttgcgccggaaagggagtaaacttaaacgatcccacgaagtgaggagagaacaatgaaagcaatgttatatctggcggcgctgctgccgctgagcgtcatggcgcagccgatcaatatcgacaataaccccaatcagccggggtacgtggtgcccagccagcagcggatgcaaaatcagatgcagacccagcaaatgcagcagcaaaacaatcttaagcagagtattcaaagccagtcgcgcgcgcagcagcagcatcttcagacgcagttgaataacgatcggcagcgggtacagcagaataacaatctgacccgtgagcagcctctccctaacaccaacggtgggatgctgcagcgccagacgaccccgtaagggccgcctgacgcagaagcgggttacgccgggaagttggggccgatgacgtcaatcgcatcggtgcagatgctgtccacgccccaacgcagcagctcggcggcgcgctgcggtttgttaacggtatagaccagaatatgcaggccagcggccttcaggctcgccacgcgcgcttcatccagcagcttatggttgaggtgaatagagacgcagccgagacgcgcggtcagttcgcgccagtcgttgcgccactcatccagcagcagcccgcgcggcagttcgggcaccgcctcctgcgcggcttccagcgcatcaacgtcaaacgatgagagcagcggcggtgtcattccctgccacagctcacgcgccgccagcgccaccgctttgccggtcagcggcccggtgccggtggtcggtttaatttcgatattggccatcatgccgtgctgacggcagcggtcggccacctcgctcagcagcggcagcggctcgcctttgaactcgccgctgtaccagctgccggcatccacttttagcagatcgttccacgccagttcgcccgccacgccccagccgttgctggtacgttcgagattgtcatcgtgcagtaaaaaaatctgcccgtctttcgataacttagcgtcaaactcaatcatcgtatgaccgtaacgagcgccggtatcgatggccgccagggtattttccggagccagtttaccgccgccgcggtgggcgacgatatgaggataaggccagtgactcatgcgcgttgtcctgtttcactatcaaaaagatgcagactttcctgcggcagattcagccacagggtgctgcccgcctgcggacgctgctggtgcggcagccggaccaccagcttttgctcgccccagcgcccgtgggcgaggttatcggcacctaaaatttccagcgtatccatcaccagcggtacgccaccttccgcctcggagcttaatgcaaaatgttccggacggatacccagggtcatcttacgcccggcatagcggcgatgctcgctgttgatgggtaaaagcatcccgccctcaagctcgaagcggctaccgtcgtcgctgacccggccttccagcaggttcattgccgggctgccgataaagctcgccacaaagcggctggccggtttttcgtagacctcgaccggcgtaccaatctgctcggcgatgcctttattcatcaccatcacccgctgcgcgagggtcatggcttccacctgatcgtgcgtcacatacagcgaggtggttttcagccgacggtgcagctgctgcagctccagacgcatctgcacgcgcagtttggcatcgaggttggagagcggctcatcaaacaggaataccgccgggtcgcgcacgatagcccgccccatcgccacgcgctggcgctggccgccggagagttcgcgcggacggcgcttcagcaggccgtccagctccagaatgcgcgccgcttcctggacgcgttcggcaattaatcctttacctaaaccgcgaattttcaggccccacgccatattctcttccacgctcatatgcgggtagagggcgtagttctggaacaccatcgcaataccgcgatctttcggttccatttcggtgacgcgcttgcggtcgatccagatatcgccgctggtgacccgctccaggcccgccaccatgcgcagcagggttgattttccgcagcccgaggggcccaccatcacaataaattcgccgtccgcgacgtccagcgtcagcggctggatcacctgggttttgccatcccagcttttggttactgcctgtagcttaagtcctgccattttatttctcactatccactaaaccacgcacaaacgcgcgctgcatggctaaaacgatgacaaccggaggaatcagcgtgagcagcatcgccgccatcacctgattccactgcgtggtaccctggccgatggcgatcatccctttgatgcccgcgaccgccgtgccgagattcacgtcggtaatgatcagcagcggccacagatactggttccagccgtagataaaggtgatgacgaacagcgccgccaggttggttttcgacagcggcagcacgatgtcgcggaagaagcgcatcggcgacgcgccgtcgatacgtgcggcctctatcagctcgtccggcagggtcataaagaactggcggaacaggaaggtggcggtcgccgaggccatcagcggtagggtgagcccggcatagctgtcgagcattttcaggttggcgatcacttccaccgtcgggaaaatacgcacctcaaccggcagcatcagcgtgatgaagatcatccagaagaacaggttgcgcagcggaaaacgaaaccagacgatggcgaaagcggagagcatcgagaccgtaattttgcccaccgtgatgccgaaggccatgatgaagctgttgagcatcatcagccagaacggcgcgctattggcccctacgccgttcacccagataaacttcatgttttcgagcagatgcccgccgggaatcagcgtcatcggcgtatcaaaaaccgctttactgtccagcgtcgccgcgacaaaggcgacatacagcggaaacagaatgaccgcgatccctaaaatcagcatggtgtggctgaaaatcgtcagcccgcgtcgattctcaatcattggtagcgcacctttcgttcaacgtagcggaactgcaccaccgtcagaataatgacgaggaacatcagcaccaccgactgggcggcggaagcggaaaggtcgagcccggcaaaaccttcacggtagatcttataaatcagggttgttgtcgcctgaaccggcccgccgccggttgcggcatcgataaccgggaaggtatcaaagaaggcgtataccaggttcaccaccagcaggaagaagctcaccggggcgatcagcggtagcgccagcctgaagaagcggcgaaccgggccggcgccgtcaatcgcggcggcttctaccagcgagcggggaatagattgcagcgcggcgaagaagaacaggaagttgtaactaatctgcttccagaccgaggcgaaaaccacaaggaacatcgcctgaccgctgttctgcgcgtggttccagtcgtagcccatctcaccgaggagatgcgtaatcagcccgcgtccggggttgaacaagaagatccatagcaccgccgccaccgcgggcgcaacggcatagggcaggagcatcagcgtctgatagaagcggctgccgcgcaccacgtaatccaccagcgcggcgaaaaacagcgagatcagcaggccgctgacggtaaccatcgtgctgaacttaatggtggtccagaaggagtccaggtagtacgggtcctggaagagggctaaaaagttatccaggccgacaaactggctggagagcccaaacggatcgacgctctgcagtgaataccacagcgcttcgcccgcgggccagataaaaaagatgacggtgataaccagctgcggcgcgaccagcacatagggcagccaacgcgagcggaacaccggacgggatgatgacatagttaaactctgagttggtttcccctcatcccggccctctccctaaacgggcgaggataaaagacggctccgggcgatcccctctccccgacggggagagggtgaggggctggctataagattacgacctggttgactgctcgaaacggcgcagcagctgattaccgcgctcaaccgcggcgtccagcgcctgctgaggcgttttcttcccggtccatacgctttccagttcttcatctacgatggtgcgaatctgcggcatattgcccaggcgcagacctttggtgaacggcagcggcggcttgttcagcatctggcgcgtcgcgatatcggcaccggggttcttatcatagaagccctgttcgcgggtcaggttgtaagcggcggtggtaatcggcagatagccggttttctgatgccattcggcggcgttttccggcttggtcaggaaatcgaggaatttggcgacgccggtataggtttctttgtctttaccctgcatcacccacaggctggccccgccgataatggcgttttgcggcgcgcctttcacgtcggcgtcgtacggcatcatccctacgccatagttgaacttcgcgtactggcgaatatccgcaagggagccggaagaggcggtggtaatggcgcagtcgccgttatagaacttctcggtggattcgtctttacgcccgaagtagctgaagtcgcctttcttgttcagttcttcgagcagagcgatatgcttcacctgctccggcttgttgaactccagtaccgcatcggtaccgtcgaagccgttgtttttggtcgccaccggcaggccgtgccaggcgctgaagttttcaatctgaatccagccctgccagccgctggcgtagccgcatttcatcccggcagctttcagctttgcggtatatgccgccagatcctgccaggttttcggcggctgttccggatctaatccggcttttttaaaggcgtctttgttgtagtacagcaccggcgtggagctgttaaacggctgggagagcagatggccggttttggagtcggtgtaataaccggagacggttggcacgaactgcgtttcatcaaactgaatgcccgcatcgctgaacacctgatagaccggcttaatcgccttcgaggccatcatcgtcgcggtgccgacttcgtaaacctgcagaatagctggcgcgttgccggtacggaaggcggcgatgccggcgctcaggctctgctcatagttgcctttatacaccggaacaattttgtagtccgggttggctgcgttgaaacgttgcgccagtgaatcaacttctttccccaactccccttccatcgagtgccagaacgggatagtggttaccgccagggcttgtccggcaaatgccaggctgagcgccagtcctaaagctgtatgtcgtaacgatatcatcggttatctctcttgttgttccggatgcgcgatttcacgcgttttatgttcgcgggggtaacatgacatgctcgaatgacagaaaaataactattgcattacaaaaatattacaataaattggcaaaaacatgatgaaacggtgaaaaaaaagtggcagggaaatggcaaagcgaaaaagagaggcggcgcaggctacagataagcggggatctgtagttaaatagggggcgttaaacagcactctccggcgagccgtcataaggaaaaatatgaagacgcttcataaacctaccgaacgcgttttactcattctggaaaccttagccaacgcggacggaatgacgctttccgagctatcgctcaaaacggatatttcaaagggaaccattttcccgatcctcaaatcgctgcagtaccggaaatatatcagccacgacgatcgtaacggcatatatacgctggggatttcgtgcgcggttctggccagctcaacggtggaaaaagagttctggctgaaaacgatcaatagcgaaatgcacgcggtggtcaatgaatgcaatgaagtttgccagctcggcattctggatgacgcctgggtgctctatgttgataaagttcagggcgaccaaaccgtgcagctggtctctaaggtagggactcgccttccggcaatctgctctgccctgggcaaggcgctgctgcataagcaccgcgacgaagagatcctggagctctatccgcagggttttccttccgttaccgcccgcagcgtaacgaatatggctcagcttcgtcagcagctggaatgggtcgccgccaacggttatgccatggacgatcgggaaatcaacgacgataccatctgctttgccgtccccctgctgcagaaaggcattattctggcggcgatcagcgtctcattgccctcttttcgcgccagcgatgaaaaaacgcagcaggttattcacgcgttaaaagaggcaaagggtcgtatcgaaagcgtgctgaataagctgcctgatattaaaaattactgatttattcgccagcggtgccgtcggaattgtgattacccacacaataccgagatttaatgatccgccgtgacgcccgcctcttctgcataattccctatttattcattgatttaatcaattatcactacgccttttacgccatttgacttcacgtcgatggcgtgtttacttatgcttaatcgcaaatacaaacagtgtttgtatatacgaacaacaaagaggttgaatatgcaaagtcgttacatcaccccggcaataacggtttttgatgagcagggcaggctggatcctgaaggcaactttcgcctgtatgatttcattaaaagcagcgtatcgggatttgtcgtcatgggcagtaccggcgagtttttctcgctggatatgaaaacatcccgtcagataattcaaatggcggcagagttcccgcgcgagggaataaaggcctatgcgggtaccagccgcatggatattgacgagtgcgtagagctggcaaactatgcagatgagtgcgggctggatggcgtcatgattatcagcccgtggtacttccgcctgactgatgaaggcatttatacattttatagccagattgcccgccgcaccgccgccaaaatattcatctataactttccggagcgcaccggctattccgtctcgccggaggtctgtttacgactcgccagcgagttcccaaacattatcggtcttaaagacaccattccggacaccaatcacacgtcgcaggtgattcgccaggtaaaatctgaagtaccgtattttgaagtctatgccggttatgacaataacttcgcgcacaatgtcctggcggggggcgatggatgtattggcgggttatccaatatttgccctgaaatattccgcgactggatgcaggcatttaacgataacgatgtgcagcaaatttcgcggtatcagcaaaaagtggatgggttaatggatatttacgcggttaacgatccgttcattccaacatttaaaaaagcgttacagctgcgcggaattattcagtccgaccgctgcacgccaccgtttagctcgctcgccacctgccagaccgaaagtattctgcggatactttcccgcgctggtattgaaattaatgcctgacccccacgcggaggtattatgaaaaccatcacagcttacgacaatccggccctcaattccgcgattaccaaatcatggaagcgcctggtgccactgatgtttattttgtacttcatcgcctttatcgacagggtgaacgtgggattcgccaaagaggcgatgcaggtggatattgggctctccaattccgccttcgccctcggcgcggggatctttttcgccgcctatgcgctgtttggtattcccgctaacctgattctgaataaaatcggcgcgcaaaaatggttaagcatcaccaccgcgctgtggggcgttctctctgccctcaccggactggtgcagacggaaacccagtttattgttctgcgctttttactggggttaggcgaagccggtttttatcccggtattctgctgctggcctccatctactttcccaataaagttcgcgcctccgtcgtcggtatcttcgtgctcggcgttccgctggcattaaccttaggctcgcccatctccggggcgcttctggaaatgcacggcttcctcggcaaacccggctggttctggatgttctttatcgaaggcattccggcggtcatcatggggatcttcgcctggttctggcttgatgatacgccggccaaagcgcgattcctgaacgacgaagagaaaaaggcgctgattgctcagcttcagcaggagcagcggcagacggaaaccagcagcgtcggcaccgccctgaaaagcctgaaagtctggcacctggcgctgatctacggcaccatccagatcagcgtttacgggctgatgttcttcctgccttcgcaagtcgcctcgctaatgggctccacgctcggctttaaggagtcgctggtcgccgccattccgtgggcctgctccgccgtcggcgtctattacattccgcgtctggcggacaaaatgccggcccgtcgggtgctgatttcagtcatctgtatgctggcggcggcgctggggctgtttgtttctgcctggtccggcccggtactcgccattgccgcgctctcgctgtcggccatcggctttctctccgtgcaacctatcttctggactttcccggcgcagattgtgtcaggctcggcgctggccgccagtatcggcttttgcaccaccatgggcgcattttgcagcttcctcgcgccgctgattcgcgttgaggtcgatgcctttttcggcaacgattcggcgggtctggtcgccctgtcgctcatcaccgtctgctgcgcgctgctgattgccgcccttgccggcagaaaagcgacaaacggcgtcgcggtcccccatcactaagtcctgatgcgcttataacaaaggataatgaacatgcagaccatcttaaaaattgaccctaccgataacctgatcgttgcgctgcaggacttacgcaaagagcagcgggttcactggaacgatgaagcctacgttctgcgtagcgatgtcaaagccaaacataaattcgccaccgaagatattgcgcccggcgatatcgtgtcgctgtacggcgtaccggtcggcaaagcgacgcgccccatcacccgcggcgaagccattaccactgagaatatcaaacactacgcggccccggtttcgcttgacgacgtcgcgccctatgactggcagcagccggatgtttccgcctggcagcagcggactttcaaggggatcgtgcgcgaagacggccgggtcgccaccgcgaactactggctggtcattccgctggtattctgtgaaaaccgcaacgttcagcgcgtcaccgatgcgctgaacgacgccctcggctacgccaataacggcctgaaaaattttgctcgccaggtgacgtcggcaggggcattaaacgataaccggcatctgcccttcccgcatcttgacggcatccgctgtattaccgtcaattccggctgcggcggcgccacctcggacagcatgacgatgtgcgacgtgctggccgcctattccgatcatcctaacgttcttggcgtgacggtcttcgccctcggctgtgaaaaagcgcgaattgttgatttcaacgccgcgctggcgaagcgcaacccgaatttcaacaaaccgattatttacttcaggcagcaggactggagtagcgaagaaaaaatgatgcaggatgcgttgaccgaaacctataacgcgatccgcgaagcccccgtcgccgagcggcaggacgtcccgctctcccacctcaaaatcggcgtcaagtgcggcgcttctgacgggttctcggggatcagcgctaacccggcgatgggcgaagtgtcggatcgtcttgtcgccctcggcggcgcgtcggggctggcggaattccccgagctgtgcggcgcggaaggggatatcgtgcaacgctgcgcgacccgcgagctgaaagagaagtttttgtcgctgatgaaaaactatgagcatgtcgcgaacttcttcggcaccaccatcgccgataaccccagcccgggaaacattgccgatgggctgatcactgacgcgataaaatccgccggcgcggcgaaaaaaggcggcagagcgccggtaagcgcggtatgcgactacgccgaaccgatgggagaaagcggcctttcgctggtctgcacgccgggcaacgatgtggacgcggtaacgggcctggtcgcggcggggtgcaacgtggtgatcttctcaaccgggttgggtacgccgacggggaaccctatcgttccggtgcttaaggtttcaaccaactccgcgctggcgaaaaagatgccggatattatcgattatgactgcgggccgattatcgaaggcacgccgctggcggacatcgccgacggcctgtttgagaaaatcatcgctaccgccagtgggacctggcgcaccaaagcggatgcgctcgaacagtatgattttatgctgtggaaacgctctctggagctgtaggaatcaagtaaaacgcccggcatctgccgggcgttttgtcttcgctacccgcccagataggcgctgcgtaccgcttcattcgccagcagcgcgtcgccggtatcctcaagcaccacgtgaccgttttccagcacgtagccgcggtctgccagcttcagcgcctggttggcgttctgctcgacgagaaagatagtcattccctgctcgcgcagctgttcgatggtatcgaagatttgctgaatgataatcggcgccagaccgagcgaaggctcatccagcagcagcaggcgcggctggctcatcagcgcgcgcccgatagccagcatctgctgctcgccgccggacatggtgcccgcccgctgaacccggcgctcatgcaggcgcggaaacagctcatacacccatttgatgcgggtctggaactggtcgcggtcggcaaaaaaaccgcccatcgccaggttctcttccaccgtcatccgcgagaaaacgcggcgcccttccggcacgatcgccaccgcttcgcgcatgattttcgccgtctgccagtcggtaatatctttaccgtcgaaaaccacgcggccgctggaggcgcgcgggtcgccgcacagggtacccagtagcgtggttttccccgcgccgttggcgccaatcagggtgacaatctctccctgattgatatgcagactgacgttgtgcagcgcctggattttgccgtaatgcgcgctgacgttgtcaaaagataacatcactttttccatcttatgcgtcaccaccattatgcttcacctaaataggcgcggatcacgtccgggttgttgcggatctcttccggcgtaccgttggccagcggcgtgccctggtttaccacgtaaatacggtcggaaatgcccatcaccagcttcatatcgtgctcaatcagcaggatggtggtgttgtgatggctgcgcagctcgacgatcagctcgtccagctctttggtctctttcgggtttagccccgccgcgggctcatccagcatcaggatttccggctgggtcaccatacagcgggcaatctccagacggcgctggtcgccgtaggccaggttactggcctgccggttggcgtgctcaagcaggccaatacgttcaagccaggtcgcggcgcggtccagcgcttcgctctgggcgcggcggaaggacggcgtcttcagcaggccggagaaaaccccggttttcagctgctgatgctgcgccaccagcaggttttcaatcaccgtcatttcgcggaacagacgcacgtgctggaacgttcgcactacgcccatacgggcaatctgctggcccggcagcccttccagatgctggtcgcgcagcataatggtaccgccggttggcttatagaaaccggtcagacagttaaaaacggtggttttgcccgcgccgttagggccgataagcgaaacgatttcccgctcacgcagctccagcgacacgttgttgaccgccagcaggccgccaaaacgcatcatcagaccgtttacggataataatggctgactcatgcctgctctccttctttggcctgcccatttttcagcttcagctgcggacgggtcatcggcagaagcccctgcggacgccagatcatcatcagtaccatcagcgcacccagcatcagcatgctgtattcattgaaatcacgcatcagctcgcgcgaaacgaccagcagaaccgccgccaggatcaccgcgaactgggagcccataccgccgagaaccacaatcgccagcacaaaggccgactcggcgaaggtaaaggattccgggctgacgaagccctgacgggcggcgaacagggtgccggcaaaaccggcaaacgcggcgctgatggtaaaggcggtcagcttgatgcgcgtcgggctgaggcccagcgagcggcaggcaatctcatcttcgcgcagcgcttcccacgcgcggcccagcggcatacgcagcaggcggttaatcacgaacaggcttaacaccaccagcagcagagcgaccaggtagaggaaaatcacgcgatcggagggatcgtacttcacgccgaagaagttgctgaacgtatcccagccgccttcgcgggcgctgcggctaaattcaaggccgaacagcgtcggtttcgggatctggctgatgccgttcgggccaccggttatttcggtgttgttaagcagcaggatgcgcacgatttcgccaaagccaagcgtgacaatcgccagatagtcgccgcgcaggcgcaggaccgggaagccaagcaggaagcccgccgccgccgaaaccagccccgccagcggcaggcaggtccagaagcccagaccgtaatagtggttcagcagcgcgaaggtataggcgccgatggcgtagaaaccgccgtagcccagcaccagcaggccggaaagccccaccaccacgttaaggcccaggccgaggatgatatagatcatcgtcagggtagcgatatccaccgttccgcgcgacaccataaacggccacgccacggcgataaccagcagggcgatcaggaacagcttctgttttaccgtcgaaccgtcgatagccggcagaataaacttcggcccggagacgttcttcatggttttctggaaaacgggacgcagcagctggaagaagaagaccactgcggttccgataaagatccactgccagcggatatcggcggcggtatccaccaccagcttcgtgccgtccagctccagctgcacgcccataaagacgcccgccaggataaagaacatcaccgcggacagcagcgccatcgcaaaatgcatcggtttcatactttttctacctccggacggcccaggataccggtaggcatcaccagcagaaccaggatcagcagcgcgaaggagaccacgtctttatattccgtactgagataggcagaagagagcgcttcggcgataccgaggatcagcccgccgatcatcgccccgggaatgctgccgatgccgcccaacaccgcggcggtgaaggccttcatcccggccataaagccgatgtacgggttgattacgccgtagaactggccgagcagaacgccggcaaccgccgccattgccgcgccgatcacaaacgtcagcgcaatcacccggtcggtgttgatgccgagcaggctggccattttcaggtcttcagcgcaggcgcggcaggcgcgccccatgcgggaatagcggataaacagcgtcagcgccagcatggcgataaacgtcacgacccagataaccagctgcatggtggtgatagtggcggtgaagttatcgctgctgcctaccgtccactggccgttgaacaggctcggcagcgcgacatcgcgcgaaccttccgtcaggctgacgtagttttgcaggaagatggacatcccgatggcggagatcagcgcaatcaggcgttttgagctgcgcaccggccggtaggccacgcgttcgatactccagccgtaggcgctggcaatcacgatagcgccgacgaatccggcggcaaccagcagccagctggtatcgatacccatcatcatcagggcggcaatgatcatgaaggagacgtagctgccaatcatatagacctcgccgtgggcgaagttgatcataccgataatgccgtacaccatggtatagccgatggcaatcagcgcataggtgcttcccagcgtgacgccgttaaacatctgctgcagaaaatagagaaactgctcggacataaggtaacctttttctacccgcccgctttgcacgggcggtgggataacttgtcttatggcttatttcgcgagggtggatgacccgtccgcgtgccactggaagacaccaaattcaaatcccttcaaatcgcctttttcgtcccaattcagcggcccaattacggttttcgcgccgtgagcttttagatctttgattaaatccagcggctcctggcttccggcccggtccatcgcctgcgccagcgactgcacggcggcgtaggtgatccagacatacggaccactcgggtctttcttctcggctttgagcgcgtcaacgatagcgctgttggccgggtcctggtcatagcgttttggcatcgtcaccagcatgccttccgccgcatcgcccgcgatgttggacagcgacgcgttacccacgccttccgggcccataaacacggttttcaggcccacggagcgcgcctggcgcagcatctggcccatttccgggtagtagccgccgtagtaaacgaagtcgatattctcttttttcaggcgcgccagcagcgcggagaagtctttttcaccggcggtaatgccgtcgaagaagacgatattcgcgccgccttttttcaggctctcctggacagaacgcgccagaccttcgccgtactgctgcttatcatgaatgatagcaatacgctgcggcttgacggtttccatgatgtattttgcggcggttggcccctgcgaagagtccagaccggcggtacgcatgatgtactgatagccgcgctgggtcagctccgggttggtcgcgcccggggagatcatcagaatgccttcatcttcatagatatcggatgccggctgggtggaagaagagcagaggtggccgataacgtactgaatgccgtcattgacgattttgttcgccaccgcaacggcctgtttcgggtcgcaggcgtcatcgtactccacggcaaccagcttatcgcccttgatgccgccctgggcattaatatctttgatcgcctggcgcgcgccgttgaattccatatcgccccactgggctaccgggccagacatcgcgccaacaacggcgaccttaatatctttggcaaaagccgcctgggacatcgccagtgcgactaaccccgcgataaccgttttcgcgttccttttcatgctgcagaaccccgttcgtgatgtggtgtaaatattttgtatttttatggttaaaaagcattctgtacttttattaaacaacgctacttttaccattatctttaatggtttagcgaggttttttgcctgaatacagagtaaaatctctatttttcaggcgattaagcaaagataatattctgtatttgctggaagataaacaaaaaaagtccagtaaacagcataaaataacgacacataaggcggaataaaacgctacatatcaggttaaaattctgcttatttttcgatccatgatgaattgctctaccctgctccttccaggaaaacgaatcccctgatgaacaggcaaaaaacggcgctccgcctggcagggaatttggatacactaacgcctctgttttgactggaccctcgcgtatgaaactgaccattattcgtttacagcacttcagcgatcaggatcgcatcgacttaggtaaaatctggccgtcgcaggatcttgcggcgctggctctggatgaaagccatcgtatttatgccgcccgcttcaatgagcgcctgctggccgcggttcgcgtaacgctaaacggcgttgagggcgaactcagcgcgctgtgcgtgcgtgaagtgacccgccgtcgcggcgtcggacaatatttagtggaagaggtgctaagggataatccagagatcggcagctggcacatcgcggatgccgacgtggaagaccgcggcgtgatggcggcgtttatgcaggcgctgggctttaacgcgcaaaccggcggttgggtaaaaaagcaataaatcggcgaaagaaggctgaacattcccggattgcggcgtaacgccttacccgggctacaaaaaaccagaccgcaccagcctgtagcccgggtaagcgcagcgcgacccgggaagaaaccgcatcaatgcatcaactccggcgcattccccgggttgcggcgtaacgccttacccgggctacaaaaaaccagaccgcaccagcctgtagcccgggtaagcgcagcgcgacccgggaagaaaccgcaccaatgcatcaaccccggcgcattccccgggttgcggcgtaacgccttacccgggctacaaaaaaccagaccgcaccagcctgtagcccgggtaagcgcagcgcgacccgggaagaaaccgcaccaatgcatcaactccggcgcattccccgggttgcggcgtaacgccttacccgggctacaaaaaaccagaccgcaccagcctgtagcccgggtaagcgcagcgcgacccgggaagaaaccgcaccaatgcatcaactccggcgcattccccgggttgcggcgtaacgccttacccgggctaccgactaaaaaaggcaacttacgttgcctttttgcttttacctttctcctcgcctatgcgaagaggcaaggatcaactgatttaaccaagaatttcgcgttgcagaaaggcgtcaagacccgaaatccccgggagcttacatcggtaagtgaccggggttgaggggcgcagacaacgcatctgcggcgtgaaaggcgcaggttaaattatttggcgtcggtcgccgtaccattagcatgccaggtaaacacgccgaactcgaagcccttcagatcgcccttctcgttccaggtgagcggccccattacggtgtcgaccgttgcgcccttcaggtatttagcgatttcagccggatcttctgactgattcaggcccgcttccagcgactgcagcgcggcataggtggtccacacgaacgcgccgcttggatcctgtttcttcgctttgatcgcatccacaatcggtttgttcgccggaacctggtcgtagtttttcggcttggtgaccagcataccttccgcagaagcgcccgcgatattagacagggacacgttcgctaccccttccggccccataaactgcgttttcaggccagcggcgcgagactgacgcaggatctgccccatctccgggtggtagccgccgtagtagacgaagtcgatattctctttcttcagacgcgccaccagggtagagaagtctttctcaccggcggtgataccgtcaaagaacaccacgttagcgccgcccttcttcaggttatcctgtaccgcgcgggccaggccctcgccatactgctgtttgtcgtggacaatcgcgatgcgctgcggcttcactttttccaggatgtatttggcagcggttggcccctgatcggagtccagaccggtggtgcgcagaatcagatgatagccgcgagccgtcagctccggcgcggtggccgccggggtgatcatcagcacgccttcatcttcatagatatcagacgccggctgggtggaagaagagcacaggtggccgataacgtatttgataccgtcgttaatcactttgttagcgacggcaaccgcttgtttcgggtcacaggcgtcgtcgtattttaccatctgcagcttattgcctttgataccgcctttggcgttgatatcggcaatggcctgctctgcgccagtaaactcctggtcaccgtactgcgctaccggaccggacatcgcgccaacaacggcgactttgatatcttcggccattgccgcaccgctcatgattaaggcaatacatcctgccagtaacgctttacccttcatattcatcctgaggctccccattattatggtttttgcatttgttgtgatgttgtttattagcgcattattctaattagacacataagaaaagcatatgatagttagattagggtctgccgcctgcgcttttgcagcacactatgctaaacataccgtcattcaggagaattggaaacgataaaattgcggagtatgtaacagataagtgacaaataaaaacccgcgccggaataaaccgaacgcgggggcatgagcaacgcgactaccagcccgcaggcaggtagccaaaggccgaagcgatggcgtaggcggcgctgcaaagatagagcaatacgatgaagatctggattaagggatgcgtgattagcgccgggcaggtccagccgggggtgatgtcaccctgccgacgcgagcctttgaggatcaggatcggcatgatagataaaatcaccccgctaaatactccggcaaaatagagcgcgttcacgaaggataccatcccgctataggccagaataaaaggcggcacggcgaccactaacagcaccttaaagcgtttgaacggctgctcgtcgttacccaggcgaaactgatcgaaaatattggtcaggaagcttccgcccaacccccaataggaggtcagcatcgcgcagagcgcaaaaagatttgccgagaagaaagcccactcgccgagcgccctgccccaggaaatggttgccacatcagaaatattatccagcccgcttaatgcaatcaccgaaagcgggaccagcgccagcaggcaaaaggttaataacatccccaccataatggccttcggcagcttctccggtttatcggcgaagccgcgcgccatctccggcacgatatactgcgcggagaaacaaaacgcgacaacgttaaataccggcaccatatacagccagttgccgtccagcaaataaccgacgctggcggtctctttcagcaacgtcgcggcaaccaaaatggttatcataacgaccatgccgatactgatgaatttctcaccccggccaatcgccttcagcccaagataaagcaccccggccgccggaataaaaaacagcgcgctgcccagggccggcgagatgccgaataacgaatgcaggagtttaccgctgccggtcatataagccgtcagcgcgccgacgctgttgacgcaaacggagaggaacatcatcaacgcgccaaagcggccgacgtagcgctgcgacaggccgctaagctgcagatgcttacgcgtgcgcagcgtcgattccgccacgtagagcatggtgatggtcgtcaggctaccgaccacaatcagccaaaacagcagcggcagaaagcccgctttgctggaggcataggcgatggatagcaccccagcgccgatattggtgccgacgatcatcgacacgccttcaatgaaactgagggattttgcaggtacagcggtacgctcccggctcgtcagagccggagaaaaggtggagttgtcagacataatattttccgttttattccggcagcgtgcgccgccggaaaaaaggtgatatcagggtgaaataccactcacgctgagcatgaataaccagactgcggcttcctgtttctgttgggcttccctgccgccgcaactggatgtaagactgactagcccttcagcacgcgggccagaatatccagcgctttcgtaaactgcgcatccagaatcgttaacggatagaggaagcgaatgacgttgccatagacgccgcagctcagcagcagcaggccgttctcctgggcttgttgctggatttgacgggtgatctccgccgacggctcgccggtttgcggatcgttaaactctaccgccaccatcgacccctggccgcgtacgtcagcaatcgccgggcagctttgacgcgcctgattcagcacctctttcagatggctgcctaagcgctcagcgcgctggcacagctgttcttcttcaatcacgtccagcaccgcgtgcgccgccgcgaccgccagcgggttaccggcataggtgccgcccagaccgcccggcgcaggcgcatccatcacctcggcgcgacctaccacgccggagagcgggaaaccgccggccaggcttttggccatcgtcatcaggtcaggcttcacatcatagtgctgcatcgcaaatagcttgccggtgcgcgcaaagccggtttgtacttcatcggcaatcagcagaatgccgtgggtatcgcacagcgcgcgcagcgcctgcataaactcaggcggggcaacgttaaagccgccttccccctgaatcggctccagcacaatcgccgccacctgatcggccgcgatatccgctttgaaaatgcgctccaggctcttcatcgcgtcggcggtggtaatgccatgggcggcgttagggtagacggcgtgataaaccgagcccgggaacgggccgaaaccaatcttgtaaggcgccactttgccggtcagcgccatggtcataaacgtacggccgtggaagccgccgccgaaggtaatcaaccccggacgaccggtataagcgcgcgcgattttcaccgcgttttcaacggcttccgccccggtggtaaagaacgccgtttttgccggaccgtcaatcggcgccagttcgttaatccgctcggccagcgtgacatagctttcgtacgggacaatctggtaagccgtgtgggtaaaggcctgcagctgctgttcaacggcggcaacgattttggggtggcgatggccggtattcagcaccgcgatgccggcggcgaaatcgatcacctcattcccttcaatatcccacagcgtagcgttctccgctttctcaacaaagtagctgcacatcacccctacgccgcgcggagtcgcctgctggcgacgctgattcagttctgaacttttcaccgagaatctcctgtcatgtgtgtcacgttatcgcaacaaatccgaaactatgtcgtttatttacacaggatttggccctataatcgagtaccaattcagattatctgagggatccaattgcgttcgcttatcgcagacctggtgctggtcagattgcagaaagaaaccgacccgctcctgcacaagcgcctttacaaggcgattcgccacgccattctggatggttctctcccgccccatagccgcctgcccccttcacgggatctggcgggagagctgagaatgtcgcgcaacacaattttaacagtttacgaacaattgctggctgaggggtacgtcgtgtcccgtcgcggcagcggaacattcgtcgcgaaaacgctgcccgatatgtttcttcccgccagcagcgccagtgaaagcagccctgcgccagcagccagcgcgcccatctcccggcgcggccagcatctgctggggcacatcagcgccagtccgcgtcagtggggggcgtttatccccggcgtaccggacgtcaatgcgtttccccacccgctgttcagtaaaatccaggcgcgtatcagccgccgtccaaaacccgaacagctcagctatagctgtaacggcggaacggccgagctgcagcacacgttggtggactatctgagagtagcgcgcggcgttcagtgccaggcagatcaaattcttatcactgaagggatccatcaggctatcgacctgatcacccgcatgctgtgcgaccgcggcgatctcgcctgggtggaggagccgtcctactggggcattcgccatgtgctggcgatgaatgaagtgcgggccgagcccgtagtggttgatgccagcggcctgtgtccgcccgaaagcatagccgaagcgccgcggctgatcttcgttacgccatcccatcagtacccccttggcgcggtaatgagccttgagcgccgacagcgcctgctcaccctggcccatcagcacggtagttggattgtggaagatgattacgacagcgagtttcgcttttccggccagccgatcccggcgctacagggcttagtccccgaagcgccggtggtctacgtcggtacgttcagtaaaacactctacccggggctgcggttgggctacgtcgtgctgcctcgcccgctggcggctgaactcaaaaacgcccacgccgagctctaccgcggcggccattcgcttattcagctggcgctggcggaatttatcaacgccggtcattactcggcgcatattcgccgcatgcgcctgctctacagccgccgtcgcgtctttttgaccgagctgattcagcggcactgcgggccgcacgcgctgtcggacttcagcgataatgccggactgcatttgatcctgaatttgccggatgaggcggatgacgtggcgattgcccgcgatgccaacgcgcgccatattttagtgcgtccgctgtcgcgctattacctgacggcgcagcggaagaaagggctgttgatgggttttgcttcgcagccggaaacgcagatggaaccggcgttcaacgtcctgcttgagtgtctgaaaatgcactgcccgcaggcgctggcggaggcagaaaaacaaaacgccccatcgtaatgtggggcgttatcgggggactggcgctcagattaggcttcgatagcggcgcgcagttttttcatggcgttcttttcaagctgacgtacacgttcagccgacacgccgtagcggtctgccagctcctgcagcgtggacttgttgtcttcgtccagccagcgggcgcggatgatgtcctggctacgttcgtcaagaccctgcatcgcgtcggtcagcttgtttgccgcctgctcttcccagttatcgtcttcaatgccgtcggcaaagttagacgttttatcctgcagatagagcaccggcgccatcggctggctatcggactcatcatccgacgacatgtcgaaggtcatgtcctgcgccgccatacgtgactccatctcacgcacgtctttgctcgacacgcccagctcgcgggccaccatttcgacttcatcctggttaaaccagcccagacgctgcttggttttgcgcaggttaaagaacagcttacgctgtgctttcgtggtcgcgaccttcacgatacgccagttacgcagcacgtattcatgaatttccgctttgatccagtgcacggcgaaggaaaccagacgcacgcccacttccgggttaaaacggcgcacggctttcatcaggccaatgttgccttcctgaatcagatccgcctgcggcaggccatagcccgagtagttacgagcaatatgaacaacaaagcgcaggtgagacaggatcagctttttcgctgcttccagatcgccctggtaatgcagcttttcagcaagctcccgctcttcatcagccgataacatcggccaagtgttagcagcccggatgtacgattccaggttaccaacgggggctaaggctaaagtttgcatatctttggtcattcaaatcctctcaatcgatatcttctggcatctttctgtcctcacaacggagcaacaaacatgccagcattgatgagcaacgagaatatcactcacattagtatcagacagtgattttatccacaagttccatgcaatgatgtgaatagattacgcacaaaatgtgacatggttatgaagtttagggaagcgtcgacagggactctttccctgcagagagatattcagtgcagggaaagattataccagatttttactactcgggagtaaagtgacgtaaatgttgaacggttgccagccaggcggcgacccagccaatcatcgagcaaacaatcagcatcagcaggcactcgtcaaagcctaagccgctgagttcaaactgcgtgccgaagactttcgccacttcggtgaccgccgacgacaggcgcatgaccataatttccgacaggatcagcgacagaaacgcgccggagaaccccagcagcgccccgccgtaaaggaacggacgcagaataaagccatcggtcgcgccaatcagtttctgcacgttaatggtatcgcggcgggcgaagatgctcagacgcacgctgttgccgatcaccaggaagaccgccgccaccatcagtacgccgatcatcgccgaaacgcgtccgaccagcccggtcagcgacgagagccgcgcaaaccagctgtcatccatacgcacttcatcaacgccctgcacgtggctcacgcggtcgcgcagcgtgttcagcgcttcaacgctctggaaatcaatcttcggcaccacgatcgccaccgccggcagcgggttctcttccagcatatccagcgcgccgccgaagcctgaccagttgcggaattcgccaagggcttcatcgcgcgacagatagttaaccttctcgacgccctgctccgcctgcagctggccgactacccgcgcagcggcgtcgtcatccagcgttttttccagatagacggtgatttgcggcgtgggataatactgcgacgccgcggtgctgacgtttttgtagaccatgtagcacacgcttggcagggtcaatgaaatggcgatcaccatcaccgtcagaaacgtcgccagcggcgtgcttttcagatcctgtagcgcgccgtgccaggcgtagcgcacctgttcattgaatacgttgctcttgcgggaagccggattcggcgccgcttttggccgcttcgacgcattgcgcccgccgctaccgcccgctccgcccgcattgcggaaacggtcgaatcgattgccgaatcggcgaatgtggttcattgcctcgcgcttattcaccgatgtggcctccatgcatatgcccctcgctgagggacaggacgcggtacggacgactggagataagccccaggtcatgcgtcgccatcagcaccgtcaccccaacgcggttaaactcttcaaacagacgtaagatcccttccgacagcgcctcgtcgaggttaccggtcggttcatccgccagcaggaccgcaggtttgttcaccaccgcgcgggcgatgcccacgcgctgttgttccccgcctgaaagctgaatcggcaggtttttcgctttgtccagcagcccgactttatccagcgccgccgagacgcgacgacggatgtcatccccgctggcgccggcgataatcagcgggatcgctacattatcgtaaacggttcggtccatcagcagatggtggtcctggaaaatcatgccaatctgacggcgcaaaaacggcacctcgcggctcttcaggcggctaatatcatggccgccgaaaaggattttgccggcgctgggccgttcgataccgcagataagcttcagcagggtacttttccccgcgccggaatggccggtcagaaacgccatctcgcccgcctgcagatggaaagtcaccccctgcagcgcttgtctcccaccgagataggctttgctgacttgttcaaagcgaatcatttttaatcctctcgggcaaaaagtgcctcaataaagtcgcccgcattaaacggacgcagatcttcaatacgttcgccaacaccgatgtagcgaatcggaataccgaactgatcggcaaccgagaagataaccccgcccttggcggtcccatccagcttagtcaaggtaataccggtcagtccaaccgcctcatggaacagtttggcctggctaatcgcgttctgcccggtgctggcgtcaatggtcagcataacttcatgcggcgcatcgacatcgagttttttcatgacgcggacaatcttcttcagctcttccatcaggtgcgatttattctgcagacgacccgcggtatcggcaatcaggacgtcaatattgcgcgccttcgccgcctggatggcgtcgaaaatgaccgatgccgaatccgcgccggtgtgctgggcaatcaccggaatattgttgcgctgcccccaaacctggagctgctcaaccgccgccgcgcggaaggtatcccccgccgccagcatcaccgacttgccctgctgctcgaactgacgcgccagcttgccgatggtggtggttttaccgacgccgttgacgccgaccatcagaatcacaaacggcgttttgccttctacgttcagcggctcatccactttcgccagaatatcgcccatctcttctttcagcaggccgtacagcgcctcggcgtcgcgcagctgcttgcggctggcgtcgttggtaagacgcgtgatgatcttacgcgtggtttccacgccgacatcggcaatcagcagctgctcttccagctcttcaaacagatcatcgtcgattttcttaccgcggaacagactgataaatccggaaccgaggttctgtttggtttttaccaggctgcgtttgaggcgggcgaagaaaccttctttggtcggtttttcctgctctaacggcgtcacgacggtttcgtccggcaccacttcaacggcgttttctgccgcatcggccgccgccagagcctgtgcttccagctcttcatcggtgatatcggcctcagcctcttctaccgtttcgtctggttccggctggtcaacggcggtttcttcaagaactgccgtttccggttcggtaatgacctcttccggcgtctgttcagcgacggcttcagccactaccggctcggcgatgacctcttccaccagcggctcagcgaccgtctcttcaaccgcgggctgctccgctatctcctcaaccgccggggattcgacaaccgcctgcggctgttcgctctccacaacctgctcggtcacctcaaccacctcggcggcaaaggcttcggcatcctgtttctctgtcgcagtggcgtcgaccgtttccggcgcaaccgcaggcgcttcgctttcctgagccggttcttcaacctcttgctgggcttctactttttgttctgtttcgctttcctgcgcctgttctttttgaccaaagcccagccaggaaaagaagccacgttttttgtctttcgccatttgcgactacactcctcgctgttaattcatggcacagcttcggccagtaggtagcggaagctgaaaaatgatgaaattagtcggatagtctaccacttaacttaactcgcatcaccgcccccggattaaggtttcgtcaaccgccgccgatcgttagaatagcagcccggaagttgagacttgagcaaagagatgaagaaaccaaaccacgcgggcagcggccagatccgtattatcggcgggcaatggcggggccgtaaactcccggtgccggagagcccgggtctgcgcccgaccaccgaccgggtgcgcgaaacgctatttaactggctggcgccgtcgatcgttgacgcgaactgcctcgactgcttcgccggcagcggcgcgctgggccttgaagccctctcccgctatgcggccagcgccacgctgctggaaatggaacgcggcgtcgcgcagcagctgcaaaaaaatctggcgaccctcaaagccagcaacgctaaagtggtcaataccaatactttagcgtttcttgctcaggcgggcacgccgcatcacatcgtgtttgtcgatcccccgtttcgtaaaggactgcttgaagagacgctaaagctgctggaaaacaacggctggcttagcgatgaagcgcttgtctacattgagagtgaagtcgaaaacggtttaccgccggtgccgatgaactggcacgtctatcgtgaaaaagtggccggacaagtcgcctaccgtctctatcaacgtgaggcccaaggagaaaaccatgctgattaattttggccgcttgctgatgctgtgcgtgtgggcgtttttattgctgaacctgtttcaaccgttcccaaaaccgctgaacatcttcgttaacgtagcgctgatctttatgattctgatgcacggcctgcagctgacgctgctcaaggcgacgcagacgaaagagatgccgccgctggggcgcttcgagcagattcgtattttcatcttcggcgtgttcgaactggtcgcctggcagaaaaagctcaaggcgaccctgaagaagaagtaatgccaggaaaaggttcaggggtctggcgtaaagcccataaaccgcgaacctttatagctcaggacgcccttatcgccgacgcttagcgcatgatactgcggcgcctgcagacgaaaaaccacttccagcccgccgctttccggcctgaagcttgcttcataacgcatttcgctgccggcaggcgtcaccgtctgctggcgcgaacggcgatcgttaatcaccttctcccgcttattgctcaccaccacccgtttttgcaacagcggcgcggcatcgttatccattttttcccgacgctgctgcacatagcgatacgacgcggcaaccgcaatgatggcaacggcaaccataaaaaacagcggaactttactcattcaccttgcccccaggaattatcaggaataagcatactgtggcttgattatcattgtcatcttcctctgcaaaccactacactgagattcagtactgtaagtacaatcacttacgtaatgataacagatacagggacttactatgctttggtcatttattgctgtctgtttctccgcatggctttacgtcgatgcgtcctatcgtgggcctgcctggcgtcgctgggtgtttaaacccgtcacgctgatcctgcttctgttactggcctggcaagcgccgatgtttaacgccatcagctatctggtgctggccgggctttgcgcctcgctggtcggcgatgcgctgaccctgctgccgcggcagcgggtaatgtacgccgtgggggcgttctttctctcgcatctgctctacaccatctggtttgccagccagctgacgctatctttcttctggccgctgccgctggtgctgctgatcctcggcgcgctgctgctggcgattatctggacgcgtctggaagagatgcggatgccggtgtttacctttatcgcgatgacgctggtgatggtctggctggccggtgagctgtggttcgcccgcccgacggataccgccctgtccggcttcgctggcgcggcatccctgctgctcggcaacgcggtctggctcatcagccattatcgccgccgcttccgcgctgacaacgcgatctcctcagcattttacttcgccgggcacttcctgatcgtccgcgcgctctatttgtaattaagcgcttgactctggagtcgactccagagtgtatcctgcgggtaatgagaaaattatcattacccggagggtcctatgtcggctccagaatcgcaggataaaaaagtcccacacttctcatcgttaaaatttacccctgccgcgcagcctgcggaaagctgctgcgcggaccccgcctgcagcagcgaaaccgccgctgaaaacgatgcgctgagtcacgcgcgctttagctggctggtagaaggcatggactgcgcggcctgcgcccgcaaggtcgaaaccgccgttcgccaggtgccgggggtcagccaggtgcaggtactgttcgccaccgaaaagctgctggtcaacgccgagggcaatgtccgtccgcagatcgaaagcgccgtgcgcgccgcgggctatcagctgcgtgatgaaaacgcgccacgggcagaggagcccacctcttggctgcgcgagaatctgccgctcctcaccctcgtcgccatgatggcgctcagctgggggctggagcagttcagcccgcctctgggcgaaatcgccttcatcgcaaccacgctggtcggcctgtggccggtcgcccggcaagcaatacgcctgatcaaaagcggaagctggttcgccattgaaaccctgatgagcgtcgcagccatcggcgcgctgtttatcggcgccaccgccgaagcggcgatggtcctgctgctgttcttaatcggcgaacgtcttgagggctgggccgccagccgcgcgcggcaaggcgtcagcgccttgatggcgctgaaacccgacacggcaatccgcgtgcgcgacggcgtgcgtgaaaccgtagcccagcgcgacctgcgccccggcgacgtgattgaagtcgccgccggaggccgcctgcccgccgatggccagctgctctcgcccttcgccagcttcgatgagagcgcgctaaccggtgaatccgtaccggtggagcgtaacgccggggaacgcgtggcggccggcgcgaccagcgtcgatcgtctggtacagctgacggtgatctccgaaccgggcgacagcgctatcgatcgtatccttaagctgattgaagaagcggaagagcgccgcgcgccgattgagcgctttatcgatcgctttagccgcatctataccccggcgattatggtcgtcgcgctgctggtggccattgttccgccgctgctgtttgcgggcgcatggctgccgtggatctataaaggtttaacgctgctgctgattggctgtccgtgcgcgctggtgatctcaaccccggcggcgattacctccgggctggcggtggcggcgcgtcgcggcgcgctgattaaaggcggcgcggcgctggagcagctgggccgcgtgcgccaggtggcgtttgataaaaccggcaccctgaccatcggccagccgcgcgtcaccgcggtgatgacgaccgcagacatcggcgaaaacgatctgctggcgctggcggccgccgtggagcaaggctccagccacccgttagcccaggcggtcgtacgtgaggcggagcagcgccagctggtcattccgccggcaagcggccagcgcgcgctggccggctccggcattgaggcgcaggttgaaggacgtcaggtgctgatttgcgccgcgggtaaaaatcgcgatccacagtacgatgaacctattcagcagctggagagcgcggggcaaaccgtggtgctggtgatgcgcgatgaggcgctgctggggattgtggcgctgcgcgatacgctacgcgatgatgctcgccaggcggtggatgaactccatcagttaggcgttcagggaatcatactgaccggcgacaatccgcgcgcggcggcggctattgccagcgaactggggctggcgttccgcgccgggctgctgcctgcggataaagtgcaggcggtgatggcgcttcatgcccagtcgccgctggccatggtcggcgacgggatcaacgatgcgccggcgatgaaagcggcgaccattggcatcgcgatgggcagcggcaccgacgtcgctctggagactgccgatgcggcattgacccacaatcgcctcaccggactggcgcagatgatttcgctggcgcgcgccactcacgccaatatccggcagaatatcgctatcgcgctgggtcttaaggggattttcctcgtcaccaccctgctcggcctcaccggcctgtggctggcggtgctggcggataccggggcgacggtgctggtcaccgctaacgcgctgcggctgttacgtaagaagtagggacaattcccgggggcggcgcttgacgcgccttgcccgggctacggattagtgcggtctggttttttgtagcctggatcagtggcttttacggatcagatagcggtacggcagcgcctcggtttcctgcgccagcagctcatgctccataaagcggcagaaaccgggaatatcgcgggtcgtcgccggatcgtcggccacgattagcagcgtctcgcccaccggcatcgtacgcacggtcttgcgcaccatcatcaccggttccgggcaacgaagcccctgcgcatcaagcgtatggtcagggctggagaaaagttcgctcattttcatctcacattaacaaaacggccctagtttacccccagttcgccagtacgcaagccaggttaacgtttgcgcgaaaaacaaccattgcaatacgctcgcaacgcagtatcatgcagccgtttttattgggttccctcaccccaaccactaaaaaggtcacaatatgagtccgtttactaccgtacagcgtaaaaaagcgctgatctggctatcgcttttccatctgctggtcatcacttccagtaactatctggtgcagctgccgatctccatctttggttttcataccacctggggcgcgttcagctttccgtttattttcctcgccaccgacctgacggtgcggattttcggcgctccgctggcgcgacgcattatcctcgcggtcatgatcccggcgctgcttatctcctacggggtttccgcgctgttctatatgggcgagtggcaggggtttgccgcattaaccagctttaacctgtttgtcgcccgtatcgccgccgccagctttatggcctacgcgctggggcaaatcctcgacgtccacgtctttaaccgcctgcgtcaaaaccgccgctggtggctggcgcccacggcatccaccctttttggtaacgtcagcgatacgctggccttcttctttatcgccttctggcgcagcccggacccgtttatggcggcgcactggggtgaaatcgccatcgtcgactactgcttcaaagtgctgattagcatcgtattcttcctgccgatgtacggcatgttgttgaatatgctgctgaaaaaactggcagataaatctgatttatccgcattgcagccaggttaagagtactcacgaaacgatgtgataagataagcgaatgagccgttaatggccgtttatcgaaaggaagatgtcaatgcgcaatttggttaaatatgtcggtattggcctgctggttgtgggtcttgcggcctgtgataacagcgatacaaaaacgccgactgccggggctgctgcggaaagcaacgccagcgggcaacctattagtctgctggatggcaaactgagcttctccctgccagccggtatgaccgaccagagcggcaagctgggcacccaggccaacaatatgcacgtctattctgatgccaccggccagaaagcggtgatcgtgattgtgggtgacaataccaacgaggagctggcggtgatgagccagcgtctggaagagcagcagcgcagccgcgacccgcagctgcaggtcgtgagcaataaatccattgagatcaaaggccacacgctgcaacagctggacagcatcatctccgccaagggtcagaccgcctggtcttccgtccttctcggcaaggttgatgacaaactgctgacgctgcaaatcacattgccagcggataaccagcagcaggcgcagaccgaagcggaaaacattatcaacaccctcgtcatccagtaactactggcctgacgccgcggcctccggttcaccgaccgggggccgtttttttaaccgccatcccagcagcagcgccaccgcaaccagccccgccgtcgccagatagatcgatgaaatgcccgcccacgccatcagcagcccggcaagcggaccggtgatccccagcgagagatccataaataccgtgtaggttgccagcgccgacccctggttctgctgcggtacggccttcaccgccaccacgccaagcgccgggaacaccagcgaaaaaccggctccggcaaagaaagtgccgattttcgccatcagcggcgtctccgccaggcccactaacagcagcccaataatctcgacgacaaaacagatcatcgccacgttcagcccgccgaggcggttaattccgttggggaacagcagccgggtgccgacaaaggcgcagctaaacagcgtcagggcgaaggccgcgccgtcccagcctttagcatcataaaacagagtgataaaggtggcgataacgccaaaacccgccgaagccagggccagcgccatgccgtagagccagacgcgccccagcaccgcgcgaaacgacatcgctttacccttgcccgctttgaccgccgcccgcggcaacgcgcacagcacggccaccagggcgaccgccataatggtcaacgccagcccgtgcaggccaatcagcgagtaacagagcacgccgagcggcgcgcccatcgccatcgctccgtaggtgacaatgccgttccaggatatgacccgcccgatatgcagcgaaccgactaccccgacgccccacagcgtggagccggttcccgcgaagctctgcccgatgccgaggataatccggccaaggcacagcagcgccaggctaaccacgggcaagccgccgaagagcgccgccagcagatagcctagtccgctcagaaagcagccgcacaggccgaaaatgacgatcttttttggccccagcagatcggcatagcgcccggcgtgagggcggctgagcagcgtagcgaagtactggaggctaatcaccagcccggcccaaaaggcgctaaaccccatcacatcatgaacatagccgggcaagaccgccagcggcaggccaatggtcaggtagctggcaaagttaaaaatcacgacagagacaatccgcagattgaggcgcaatccattaagcgccggttcggcgacggtttcgggcatcgggttccaccagatttttacaactgtgtttcatttctaccacgccgcacgttataaatcagcagccagattaggattccaggcagcaagccagccgctacacttaatgaaaatcatagaaaggaagagtgaatgacaacccctcagcccgataaaacgggcatgcatattctgctcaaactggcgtcactggtggttatcctcgccggtattcacgccgcggcagatatcatcgtgcaactattactggcgctgttcttcgccattgtcctcaaccctctggtcacctggtttattcgccgcggcgtgcgtcgcccggtcgccattactatcgtagtggtggtgatgctgatcgtgctcaccgcgttaattggcgtactggccgcgtcggttaacgaatttgtcgccatgatgccaaaatataataaagagctgacggcaaaagtcctgcggctgcaggaggcgctgccctttttgcatattcatatgtccccggagcgtatgctgcaacgcatagactccgacaagctgatgacgttcacgaccaccctgatgaccgggctgtccggcgccatggccagcgtcgttctgctggttatgacggtggtatttatgctttttgaagtccggcatgtgccctataaactccgttttgccctcaacaacccgcaaatccacatcgccggtcttcatcgggcgttaaaaggcgtttcgcattatctggcgctgaaaacgctgctcagcctgtggaccggggtgattatctggttagggctgatgctaatgggggtgcagtttgcgctgatgtggggcgtgctggcttttctgctgaactatgtgcctaacattggctcggtgatttccgccgtcccgccgatgatccaggcgttactttttaacggatattatgaatgcctgctggtcggcgcactctttttagtcgtgcacatgattatcggcaatattctcgagccccgcatgatgggccaccggctgggcatgtctacgctggtggttttcctctcgttgctggtctggggatggctgcttggaccggtgggaatgctgctgtcggtaccgttaaccagcgtgtgtaaaatatggatggagaccaccaagggcggcagtaagttagccatcctgctcgggcccgggcgccccaaaagcaggctaccgggctagctgatcttgacgtatcaatgcatccgtatacccgtatttaaaaaagcgggtatgcgggaaatacgttattcagataagcttcatagataaatcacaacagaacactattcacctgctatttattttcaactttttcgctacagagcagaaacatccctcctttgattatattcattgatagagcatattaatttaattatacttttgcaccggcctctaacaagcggcctccattattcgtcttgacaataaaaacccattaacatcagagtctccatctatctgaacgacttaaaagcagacaaacacacgaattaatgtagaataaaaacgatagccgcataacatctacgtatcaatatttccaacacgatatattatttttttaaccaataaaatgatagggagtattcatgaaaaaaataattcgctgggttgccgccgcaacgattatcggtgctctggcaggctgtgcccgtacagcgcccattgaacaaatccatacaacagtaagcgcaggccataccgaagccgaggttaaaaatgcaatcatcaaggcaggtgcccagagagaatggattatgtcagacgctgggccgggggtgatcaatgcccgccaacaaatacgcgaccatattgctgaaattaaaattaactattccgcaaccagctattccatcaactatgccagcagcattaacctgatggcctccggtggaaaaattcatagaaactataaccgctgggtgcacaaccttgataaagatattcaaattacccttgccgcggactcagctcggtaaatgaactctctttgggccaataacggcccgttcccccactaaactgtaaaggctgtgtcaatcgtgtacaaaaaggacactctcagcgcactggatgctattaccgaagcgcagcggattgcttttgcccccatgctttttcaaactgcattatgcctacgcaactcaggcgtactagattacctcgaccatcaaggtaaactcggtgcgacgctggaggctatttgtgagcattgcgaggtaaatgaatacgccgtcagcgtattgctggatatgggattaagtggacgtatccttactcataaaggagagtgctattatctcgctaaagtaggacatttcttacttcatgatacaatgacccgggtaaatatggatttcacacaggatgtttgttatcagggattgttttttctggaaaatgcgctccaggaaggaaagccaaccgggttaaaagtatttggcgactggcccacgatttatccagccctggcacagttaccgcaggcggcgcgtaaaagctggttcgcttttgatcattactattctgacggggcattcaatgctgcactgccgtatgtattcgccagccagcccgcaaccctgtacgatgtaggcggaaataccggaaagtgggctttacgctgctgtcagtatgatgaaaatatcgcggtaacgttattagatttgcctcaacaaattgcactggctcgtgaaaatatagaaaatgcaggccttacccaccgcatcgatttccatgctgtggatatgctgagcgacgcgcaccttcccggggaagcggatgtctggtggatgagtcaatttcttgactgcttttcaccagaacaaattatcaccatgctcagtaacgtggcgcgcgtgatgaaacccggcgctcgcctgtgcattctggaactgttctgggacgcgcagaaatttgaagctgcatctttcagcctgaatgcgtcttcgctctattttacctgcatggccaacggttacagccggttctacagcgtcgacaagttttatcgctatctggaaatggcaggattccaggtagaacaacgtcaggataatttaggcgttgggcataccttattgatatgccagaaaataaaataacaaagcagcgttactcgctgttttggcgttcaatttaacgccagcaaaatcattgattgatcgcggacgcgagcggatgacattttcatttaacataattgactggcaagccatggctcctggggtcagtggcaccgaacagtggcaaaagtggtcacggcatttgcacgccatcgaccccacggcaccgttggctaagctcagcgagctgccaatgatgacggcccgccggctcagctccggtagtaagctggcagtcgagtgcgggctggcaatactccgtcgccatgagatagatgccgtggtgtacaccagccgccacggagagctggagcgtaactaccggatcctgcacgcgctggcgacagagcaggcgctctctccaaccgatttcgccttatccgtgcataactccgccgtaggtaatctgactatcgccgcgaaaaagccgatcgtttcatcgtcgctctccgccggccgcgatactttccagcagggattgtatgaagtcatgggtctgctgaatgcggggtaccagcgtattttaatagtcgatttcgacggtttcctgcctgttttttatcacccgcagctaccacctttgatgcccacctggccctatgcaacggcgtggattattgaggctggtagcgaatggcagtgtaaaacccaacgctgcgaggttggcgaggagagcgagctaccgcaaagtttgctgtttttacaacactatttgcagaataccagcacattcaccatccccggtgagcgcgcgcagtggcagtggtgccgctcatgaatagtatgctacccaagctaaaccgtctttggcgagcggcaatgaccggcttttgtttcgcgcttttcgggcttggcgggctgctgctctcgcttgtctggtttaatctgctgctggcaacgattcgcgacaaagcccgtcgccgtcgactcgcacggcgcagcatttcagccagtttccgattctttctcaccgtggtaaaagccgttggtgtactcgattttcgcattgaaggcggcgacgttttgcgccaggagcgcggttgcttgatcgtcgccaaccaccctagcctgatcgattatgtcatgctcgcttcagtaatgcccgaaacagactgcctggtgaagagcgcgctgctgaaaaatccgtttctcagcggcgtgattcgcgcggcggattatctgattaacgatcaggctgatgccctgcttccggccagcagccagcgtttacaacagggtgacaccattttgatttttcccgagggaacgcgcacgttacctggcgaaaaaatgacactacagcgcggtgcggccaatatcgcggttcgctgcggtagcgatttgcgcgtagtcgttatccgctgtaccgagcatatgctgggcaaacagagcaagtggtatgatgctccgccaacgaaaccacgctttaccattgcggttggtgagcggctacaaatcaaccaattttacgatgcaaacatacaagaaccggcgctggcggcaaggcagttaaaccggcatattttgcttcaattacaatcaggtactacgcctggcacaggaattaatgatgcaagcgctctatcttgaaattaaaaatctgatcataaatacactgaacctggacgaactgtccgttgacgatatcgaaaccgaagcggcgctgtttggcgatggtttgggactggactcaatcgatgctctggaactgggtctggcagtgaaaaaccagtacggtgtggtgctgtccgccgagagtgaagagatgcgtcagcactttttctccgttgccacgctggcatctttcattcacgcgcaacgtacctgaggagacgccgttatgaccgcacaaaacgccatttacgaagaagtctccgcgctgctgattaagctgttcgaagtcgatgcgcaggcgattcaacctgaagcgcgcctgtacgaggatctggagctggatagcatcgacgcagtcgacatgatcgtacatcttcaaaagaaaaccggtaagaaaatcaagccggaagagtttaaagccgttcgtaccgtgcaggatgtcgtcgatgcggtagaacgcctgctcaaagaagcataattctccgtgtcaggcgcacggtcgctgccggtcatcaccctgctgacaggtttattgctgctgacctggccatttttgatctggtttggtctggcgcataacggcctgcgctggctgctgccgctaattgcactcttgctgtttttacgctgtcgtcagatccgacgacaggcggggccactacgcatcgtcacacagatcgttgctgctgcaggcatcacgctgtgctctgccagctatctgctcaaaactcaccaactgctactgttttacccggtggtagtgaacagcgtcatgctagcggtttttggcggttcgctgtggtcagctatgccgattatcgaacgcctggcacgactgcgagaaccagaccttccagaaactgccgttcgttatacacgccgtgtgacacaaatttggtgcgcatttttcatcttcaacggcagcattgcgctcttaaccgcgctgcacggcgacatgtctatttggacggcgtggaacgggatgctctcttatctgttgatgggcatgctgatggccggtgagtggttagtacgccagcgggtaatgaaaagagataatcaatgaagccgatcctcactctggcccagtggctcaacgcccctcgcccggtcgacacgtcgattgcatggcaggaaggacatacctggacacttgggcatctgcgcaaggatgtcggtcatctgcttgaatacctgcaacagcaggaaggcgatcgctgggcgctatgttttgaaaacagctatttgttcatcgtcgcgctgctggcaacgctgcatgcaggtaaaataccggtgctccctggacactgccgcgtaacattattgagtgagcagcacaccctatttgacggtctattgagcgataaagcgctggactggcagggctcgctgcgggtggtcagttccgccatgacgctcgccactgaatccttcgcctttccagcaatcgacaacgatgcatatattgagctgtttacctccggatcgactggtcagccaaaacgtgtgaacaaaccaatacgccttctcaacaacgaagcacagctgctggcaacgcgctttgccgatcgtcttgcaaattgccgcatagtcgcttcagtcacacctcaacacctgtacggcctgacattccgtatcttcctgccgatggccttaggtctgcctctccacgcagggatgctctggtacgcagagcagttggcggctctgagccataaatatcggtacgcgtttatcagcagccctgcattcctcaaacgcctcgacggccagctcgctcccccaccggtagagatgatcctgtccgcgggtggtgtgctctcctggtcagatgccgcgcgagcagctagctggctgaacgtttgggtggatgaaatctacggcagtactgaaaccggcgttatcgcctgccgcgattaccaacaagatgatgcgaaatggttgccttttcctggcatcagcatccatcaggaaaatggttcatttcgcgttatttcaccgctaattgcagatgttgatggctttttactcgatgatattctgcaattttcaaaaaatgggcagttcggcctgattggacgccgggggcgggtggtcaaaattgaagagaagcgcatttcgctcagcgaagtggagcagcgcctgctgatgttggacggcatccttgatgcagcggtattaacggtaacacgcggcagccgtcaaagcgtgggcgccttgctggtcctggataacaacgcgcgaaagcgctggggtaaaacccaggaattaacatggcggaaagcgttgagctcatggctggagccggtcgccgttccccgctactggcgggtgattgatgaaattccggtaaacagtatgaacaagcgtgtctatgcgcaattacaggagttatttcatgaaaccccatgaaattgagcgccatcaagcacaacctcatcagattcaaatcgatttatatctcgaccccacgctgttctggtttcgcgggcattttgccgtccagccgctgctcccgggcgttgcgcaaatagattgggtgatgcattacgctaccaccctattcgcgcccggctggcgttttcatagtattcagaacgtgaagttccaggcgccgctattgccggagacagccgttacgctcaccgtactctggcaggaagaacggcaaatactcacctttagctatcagcgccacgacggcgaagcgcgacacatagccagcagcgggaagatccgtttatgccgttaaatttttccccgtgcgtgctgatcccctgctataaccacggcgcgatgatgtcgcgcgtgctggcgcgtcttcagccgtttggcctgcactgcatcgtagttgatgatggcagcgatttccgtacgcaacaggaactcgaacgattagcggcagcatctgcaaatatgactttaattcgcctgccgattaactcaggtaaaggcgcagcggttattcgcggcatgcagacggcagcggaagctggctttagtcatgccgtccaggttgatgccgacggccagcatgctcttgaagacattcccaaactgcttgccctggccgaggaacacccgacggcgctgatttccggacagcctatttacgacgattccattccccgctcgcgcctgtatgggcgctgggtgacccacgtctgggtgtggatcgaaacgctttcgcttaaattgaaagacagcatgtgtggctttcgggtctatccggttgcgccaacgctgcggctagcgcagcgcgtggcgctaggtaagcggatggacttcgatactgaagttatggtgcgtctctactggcagggtagtaccagttattttatcccaacccgcgttacctatccgctagacgggctatctcatttcgacgccttcaaagataacctgcgtatctcacggatgcacacgcgactgttcttcggcatgctgccgcgcatcccatcgctgttgttccgccacacatcgccacactgggcgcatcagcaggaggtcaggggattgtggggaatgcgtgtgatgcttctggtatggcgcctgctagggcgcaaggcatttactctgctactctatccagtggtcgccgtttactggctcacggcttccactgctcgtaaagcttcgcggaactggatagctcgcgtacgcgaacagctctccgagcgtctgatgccggtccccccttcgctcaccagctaccagcactttctgcgcttcggaaatgcaatgctcgataaaattgccagttggcgcggcgagctgcggttgggccgcgatgtggtattttcgcctggcgcggaagaagccctcaacgtcaactcaccgtacggcaagctgctgcttgcatcacatctgggcgatgttgaagcctgccgcgcgctagcgcaattacagggcagcaaaatcatcaacgcgctggtattcagcgacaatgcccagcgctttaagcaaattatgcaggaaatggctccgcaggctggactcaacctgatgccggtcaccgacatcggcccggagaccgccatccagcttaaagagaagctagagcgcggtgagtggattgccattgtcggcgatcgcattgcggttaatccccagcgcggcggcgaatggcgcgtctgctggagccgctttatgggccaacccgctccgtttccacaggggccgttcattctcgcctcgattttaggttgtcaggtggatctgattttcgccctgcgccagcagggaacgctgcgtattcactgcgaaccgttcgccaatccgctgctgctgccgcgcgccgaacgtcaggatgccttgcagaaaactatcgagcgctacgccgaacgcctcgagcactatgcgctccagtcgccgctggactggtttaactttttcgatttctggcaactgccggacaccaaacacaaggaataaaaggtgctgaacgatccccgctttacggctgaagtcgagctggctatcccgttccacgacgttgatatgatgggcgtggcgtggcacggcaactacttccgctactttgagattgcccgtgaagcgcttctgaaccagttcgactacgggtaccgacagatgaaagcctcaggttacctgtggcccgtggttgatgcgcgggtaaagtaccgtaatcccctgacctttgagcagcgcattcgcgtccgcgcgcgtatagaggagttcgaaaaccgcctgcgcatcggttatgaaattttcgatgccgaaacaggaaagcgggcaacgactggctacaccattcaggtagcggttgaagaaaagagtcgcgaactgtgctttgtcagccccacgattctgtttgaacgtatgggagttacgccatgagattcttaccactgctggcgctgttcatcagtcccatagtcagcgccctgacgcttgataatctgcaacagcgctttaccgaacagccggtggtccgggcgcatttcgatcaaaccagaacgattaaggatctgccgcagccgttgcgatctcaggggaagatgctgatcgcccgcgaccagggtttactatgggatcaaaccagccctttcccgatgcagttgctgctggatgacaagcggatggtgcaagtgattaacggccagccgccgcaaaccatcaccgccgagaacaaccctcagatgttccagttcaaccatctgctgcgcgcgctgttccaggccgatcgtaaagtgctggaagagaatttccgcgtagagtttgtagacttaggcgaaggacgctggacgctgcgcctgacccccatcaccacgccgctggataagattttcgcgaccattgatttagccggaaaaacgtatctggagagcattcaactcaacgacaagcagggcgatcgtaccgatatcgcactttcccaacatcaactcacgccagcgcaactgaccgatgacgaacgccaacgctttgccgcccagtaaacgccctgcgttgctatggggaatcgcctgcctgatcctgctgggcgttctgctaacgcagctgcctcaggcgcggctaaacagtagcgtgctggcgatgctgccaaagcaaacactggggaagacccctccgagcctgaacgacggtttcatgcagcgtctcgaccgacagttggtctggttggtaagccctggtaagaaagccgatccggcggtagctcacgactggctgatgcgattgcaaaaatcgcaggcgctggctgaagtgaaaggcccaatggacgccaacagccagcaagcgtggggagcttttttttggcagcatcgcaacggactaatcgatagcgacacccgtgcgcgtttgcaaaacggcggcgaggcgcaggcgcaatggatactttcccaactctactcggcattctccggcgttagcggcaaagagttgcaaaacgatccgttgatgctgatgcgcggctcgcagctggcaatggccaaaaacggccaacgcctgcggctgatggacggctggctggtgactcaggataaacagggcaactactggtatctgatgcatggcgagctggccggttcctcgtttgacatgcagcagacgcatcggttggtcaccacgctaaaaacgctggaaggtgaacttaaagcgcaatatccgcaggcacagttgctgtctcgcggcacgctcttttacagcgattacgccagccagcaggcgaaacaggatatctccaccctcggcgtggcgactctgttcggcgtgattctgctgattatggcggtattccgctcgctgcgcccgctgcttttgtgtctgatatccattgctattggcgcgctggcgggcacggtcgtgacgctgcttattttcggcgagctgcatctgatgacgctggtgatgagcatgagcattatcggaatttccgctgactatacgctctattatctgaccgaacggatggtgcacggtgcacaaatgtcaccgtggcaaagcctcgctaaagtgcggaatgcgctgctgctggcgctactgactaccgtagcggcgtacctgattatgatgctcgcccccttccccggtattcgtcagatggcggtcttcgcggtgatggggttaagcgcctcctgtttaacggtgattttctggcatccgtggctatgtcgtggtctgcccgtccgtcctgttccgtccatggtacaaatgctgcgctggcttgccgcatggcgacgcaataaaaagctttccatcggtttgcctgtggtgctggcgctgttctcgctggcaggtcttgccacgctgcgcgttgatgatgatatatcacagctacaaacgctgccgcaggacatcctggcccaggaaaaagccattaccgcgctcaccggacaaagcgtcgaccagaaatggttcgtagtttatggcaaatctgcccagcaaaccctggagcggctggaacgctttacccccgagctggagcaagcgaaaacagaaggatggctcagcaggtatcgcaccattccgctaaattcgctcacccgacagcagcaggatcttagtttgttgaaaaatgctgcgcccaccgttaccgcagccctgaataacgccggactagcggcagtaaatcccgacctcaacgccatgcaggtaacggttgatgcctggcttgccagcccggctagcgaagggtggcggctattgtggataacgctggcagatggagaaagcggcgtactagtgccagtagaaggcgtgaacaatagcgcagcgctaaatgctctcagcacaagatatgttggtgttgcgtgggtggatcgcaaaagcagcttcgacgagctgttcacactttatcgtcatatcctgaccggcctgctgtgcgttgcgctagcggtgattgcctgcggggcgatgattcggcttgggtggcgaaaagggctaattagcctggtgccgtcgatgttatcccttggctgcgggctggccgtactttcgctgagcggtcatacggtaaacctgttctcgctactggcgctggtgctggtgctcggaattggcattaactacacgctgttttttagcaatccgcacggcactccgctgacgtcgctactggcgattacgctggcgatgctaactacgatcttgaccttgggcatgctggtttttagcgccacccaggctatcagcagttttggcattgtactagtaagcggtattttcaccgcgtttctgctttcaccactggcgatgcccgcgaaaaagagaaaaaaagataatgattaaaccgacgttctggcgcgccatcgctctgatcgcaacgctgatactggccggatgcagcagctcgcagccggaacaacaagggcgccctcaggcctggctcgagccgggcacgcgcgtcacactgcctttaccggacatctctccgccgattaattcacagcaactactcaccggcagctttaacggcaaaacccagtcgctgctggtactgctcaatgctgacgataaaaatctcacgttggcaggactctcctctgtcggcattcgcctgttccttgtgacctacgatgaaaaagggctgcacagcgaacagtcaatcgtggtaccgcagttgccgccagcaagccaggtgctggctgatgtcatgctcagccactggccaattcacgcctgggagtcgcagttgccaaaaggctggacattgatcgactgcggcgataagcgcgaactgcgcaacgccagcggtaagctggtcaccgaaatcatctatctgaatcgcaaaggcaagcgtgagccgatcagcatcgaacaacatgtctttaaataccacatcaccattcaatatctgggtgactgaaatgatctatatttctgccgtcggcatgatcaacgcgctgggtagcgataacaatgaaattgccgccaacctgatgcgcggcgtggcacccggtatgcgccctcgttcgggctggcttcggggacatccgcacgcggtattagccggtgtagatggcgaactgccggtcattcccgatgagttcagcgcccatcgttcgcgcaataatcaattactactggcggcgcttaaacacattcagccgcaggtcgataaggctattacgcagtacggacgggaccggattgccgtgatactgggtaccagtacctctggacttgatgaaggcgatacgcacgttaatctgacgcttaacggacaggaaagcgcggcctggcagtacccgcaacaagagctgggagacccatcgcgctttcttagccgctggctggcactggctggcccggcattcacgctgtcaaccgcctgctcttccagcgcccgggcaataattagcggacgccgcctgcttgaagccgggctagcggacgtcgcgattgtcggcggtgcggatacgctgagccgaatgccgatcaatggcttccacagtctggaatccctctccccaacgctgtgccagccgttcggtcgtgaccgcaatggcattactattggtgaaggtgccgcgttgatgctgctgactcgtgaaccgcagcctattgctttactgggcgtgggcgagtcgagcgacgcataccatatttcagcgccgcatccacaaggtgaaggagcgatccgcgccattcatcaggcgctgcacgacgcaggaatcacgccagagcaggtgggctacatcaatctgcacggtaccgccacgccgcttaacgaccagattgaatccagagtggtgcacgaactgttcggcgaaacggtgccatgcagttccactaaacacctaaccggccacacgctgggtgcggcagggatcaccgaagcggcgatcggtatgctaattttgcaacgcaacctgccactaccgccgcagaattttagctcctcgccacgcgacgaaacgctgccgccctgcggtatcatcgagcagccgcagccgcttgaacgtccagttatcctgtcaaactcgtttgcctttggcggcaataacgccagtattctgctcgggaggatctcatgagcgactatttaccccccggcgaatacctgccgcacgacgagccaatgctgctgcttgatgaagtggtaaatgtgacggacgactccaccctctgccgagtcacggtatcggccaatggcacgctggccccctttctcgatgcagaaggccatctccccggctggtttgccctggagcttatggcgcaaaccgttggcgtctggtcaggctggcaccgccaccggcagggacaagagagtatttccttaggtatggtactcggcgcgcgtgaactggtctgcgcggcggggattgttcccgccggattaacgctgaatgtctccgtcacgttgctgatgcaggatgagcgcttcggcagctttgaatgcacgatcgccgctggcgaagagacgttggctactggcagggttaacaccttccagccaacatctgaagaacttaacaccctatttcaacaaggagcgtccgcatgaatcgttcagttttggttaccggctccagcaagggaatcggtcgcgctatcgccctccaactggcagcggacggctttattgttggcgtccattatcatcgcgatgcgcagggcgcgcaggagacgctggatgcgattctcgccgcaggcggcgctggccgcctgctgacgtttgacgtcgccaaccgcgagcagtgccgcaaggtgttagagcaggatatcgaggcacatagcgcgtggtacggcgtggtgagcaatgctggtatcacacgcgatgcggccttcccggcgctcagcgataacgactgggatacggtgatccacaccaatctggatagcttctacaacgttattcagccgtgcatcatgccaatgattagcgcgcgtaagggcgggcgaatcattacgctttcttcggtttccggcgtaatgggcaatcggggccaggttaactacagcgcggccaaagcggggattatcggggcgacgaaagcgctggcaactgagctggcaaaacgcaaaattaccgtcaactgcatcgcaccggggcttatcgacaccgggatgatcgaaatggaagaggccgcgcttaaagaggcgatgtcgatgatccccatgaaacggatgggccatgcggacgaagtggccgggcttgccagctatttaatgtcggatgtggcgggctacgtgacccgtcaggtgatttccatcaatggagggatgttatgacgcgtagagtggtgattacaggcatgggcggtgtcaccgcctttggagaaagctggcaggccgtttccaccagactgcttgactacgagaacgcagtacgcaaaatgccggagtggcaggtttatgacggcctgcatacgctgctgggcgcgccggtcgatgatttcaccccaccggagcattatacccgtaagcgtattcgctccatgggccgcgtatcgctgatgtccactcgcgccactgaactggcgctggagcaggcagggctaattggcgaggcagtgctaaccaacggcgaaactggtatcgcctatggctcctcaaccggcagcaccggaccagtgagtgaattcgccactatgctgaccgaaaaacacaccaataacatcaccggcaccacctacgtacagatgatgccgcataccaccgccgtcaacaccgggctgtttttcggattgcgcggtcgcgttatccccacatccagtgcctgtacctcaggcagccaggcgattggttacgcatgggaagcgattcgtcacggatatcaaacagtaatggtggctggcggcgcagaagagctatgtccgtcggaagcggcagtgtttgataccttattcgccaccagccagcgtaatgatgcccccaaaaccaccccttccccgttcgatgaacaacgcgatggtctggtgattggcgaaggcgcaggcacgctgatcctggaagaactggagcacgccaaagcgcgcggtgcgaccatctacggtgagattatcggtttcgccaccaactgcgacgcggcgcatataacccaaccgcagcgagaaaccatgcagatatgcatggagcagtcactgaaaatagcaggcctgagtgctctggatattggctatatttccgctcacggaacggcgaccgatcgcggtgatattgcagaaagcctggcaacagaggcgatttatggtaacaacgtccccttctcttccctgaaaagttattttggccataccctgggtgcctgcggtgcgctggaagcctggatgagcctgcatatgatgcgcgaaggctggtttgcgccaacgttgaacctgcatcatccggatgccaactgcggcgcactggattacatcatgggtgaagcccgcaaaattgactgtgagtttctgcaaagcaacaactttgcctttggcggcattaacacctctattatcatccagcgctggccctgaaatgtaccggctttttctgggaaacgtgtcggccttaagcgcaggcgatctgccgtctgcattgatctcctgcgcgcctcagggcgccggccaaactcgctggctggccgggcgtgccctgctttcccatgccgtttcgccactgccggaaattatctatagcgaacagggcaaacctgctttctcggccggtacgccactgtggttcaatctgagccacagcaacgacgatatcgcgttactgctgagcgacgaaggtgaagtgggttgcgatatcgaagttgtacgccagcgcgataactggcgcgcgttggtaagcgcggtttttagcccccgcgaacaggctgagatcgaggctatccccccggaacggcagatagctgccttctggcggatctggacacgcaaagaagccatcatcaagcagtacggcggaagcgcctggcaaatgcgcagtatcgacagcacgcagccctccgcgctgtcggtgagccagattcagataggatcgctcagcctcgcggtctgcacgccaacaccatttcttttgaccaccgcgaacatcagccgggttcgctcgtaaaatcaagccctgcgggcaaccggcaccagactgcacgctcccgtagcgcggtcaacactgcaccaccggaaagattcaatgccaatcatcagccccgccacactttccggaggcgatgctgcgcatctgtccgggctaccggccagcagccggctcaactccgcagcccgagcggcgcagcgccaccgggaagaaacagtgatattagccaggctaattgagccgcttcaccggccagaagatcgtcagcaccccggcgacaatcagcagcacgcccagcagcgattgccagtggaaaggttcatgccagccggggagccagatggcggcggcccataccaggatgtagctcaggctcagcagcgcgtaggctttcgccagcggcagttgatgcagagcgaagtaccagcagaccatcgacagcaggtaacccataagcccgaacgccaggccaaacgtgcccgcccgcagatgcagcagatggttgaggaaggtgaatatctccgtcagcggcgggagctcgaccatcgcgctgcgcagcagcagctgcgcgccgctcgccaggccgacgctgaataacgcccagattaagcccatcagatacggctcccgagaataacgatcccaacgacgatgagacccacgccaagccagtggcgacgcgcgaccggctcgcgccagatcccccacgccgccagcgtcacccagacgaagttcaggctcagcatgggataggcgatgctgaccgggatcgactgcagcacgctaagccacagcagcatgctgcagccgagagagagcagcgcgagccccagccagccaaggatatggtacccgcgccgcccggatttggacgggcgggtcgcctgtttctggcacagctgtccggcgcagctcagcaggctggcgaaaaccagacagatccagacgctcattgcggcagatactggatatataccacgcgcccaagctcgtaggagctatccggtttcggtagcgctaaatcagccatactttctcctttatccatcagcagaaccagcgagacggggccctgttggcggtgcgtcgctagccagtcagcaaaatgggcttgatcgacaaactggtgctgcgcgtccggccaggagagaccgtacttcagctcgccctgcttgtcgaacagaatgatatcgctgcgcttgagctcccacgacagcccgccggcgataccgacgttattggtcaacacgtagcggctcggggtcagcgattcgctgacgatatccaccaggaactgcggctgcttgctgtcgatcacccgatccgggatagcgaagcccaccagcagcgccagcccgagcgggcagcaggcggcgagggtccagcggcggccgttgtccttcatcgccatccagcccatcagcgcccagcagccaaatatcagcgccgccagcaggcacttatagagctcaatatggctccataccggcttgtgcataaagccccacggcgaaaccaccagcacggcgaccaggccaatcaggccaaaggccaggttgatcgcgccgttaattttcagcgccttcgcccccgctttcgccgcgtccagcgcgtagcgcgccatcagaatcgacaggggagcaaaacagggcaggatataggttgggagtttacccttagcaatgctgaagaacaggaacggcatcgccacccatccgagcaaatagagcgcaccgcgcgactcatcgcgttcggtccagccgcgcttgagcgcacccggcagcagcgccagccacggcaggctgccggcaatcaggaacggaatgtagtaccagaacggcgctttatgctgggcatctttttccgcgaaacgctggatatgctccacccagaagaagtagcgccagaagtccggctcgcgtttggcgatggcaagaccccacggcagcaccaccagcgcgcagacgcccaccgccagccagccgtaagtcaacacttcgcgccagcgcttacgcgcaatcacccacggcagtaccccgaccaccggcaccgccagcgcgaggaagcctttggtcatcacccccatcccgcaggccacgccgagtaaaacatagccgagaattttgccgccgcggctttgggcctgcgccgcgccccagaagctgcacatcgccagcgccatccacatggtgatcatcgggtcgagcaccgcgtaggtgccgataccgtagaccagcagcgtggtcaggaagatcgccggtgacaggatcgcgacgcgtttatcgcggaaaagacgccatgccagccaggcgaccagcagagcggtgacggtaatggaaaacaccaccccaaagcggacggcaaaattattgtggccgaatagccactggccgatgctgttgatccagtagccggcaatgggcttttcaaagtagcgcagcccgaggaaatgcggcaccacccagtcgccggtcgccagcatttcgcggctgatctccgcgtagcgggtttcatcaggctgccagagcaggcggaagttaagcggcagtaaatagtagaggacaaaaagggcgaccagagaggcgccgtagcgaatgcttttcatcaaacacccgaattgagtaattgttcacgtccaagccagccttcccggccggccagttcaccacgaaccactttacctcgcggcagcacgctaaaatcggcgggcagcagctggcttagcgggcaaaaccggatctcttcctgtgcggccatggtcagcagttcatcaaactgctccgcgaaggcgatgccttccacttcggcatggatggtatagaccggcgtccccgcgtcgcgatggatgcagtccagcagatagcggttgaagcccgcactatccaccgcgttgcccaccacttcatcccaggtcggtaaggttaccgggatctgcacggttcccggcgcgccgttccccagctgcggcagaaaaggcccggtcccccggcagtcgctgttatagaggaaatcgaaagcctctttggctttgatcacccgctgatcggcacgccagccggcaacggcggaacaggtgaccgggcgaccgataatccgctccagctccagcagcccgcgttcaacctccagcgtcagcctttcctgcggccagacgccgctccacgcctgccagctatagtgatcccaggcgtgcaggccgacttcatgctcctgcgcggcggcgcggataacgtcctcattcccggcgccgatcctgcgccctggccaggcggtaccggccagcaggatatcccagccgtacagcgacgcggcctttgagcgcagcatcttccacagaaacttcggttttatcaggcgccagatatggcgccccatgttgtccggcccgacgctgaaaaagaagcttgcctgaatcccgtgctggctcagcagagccagcagccgcgggaccccgtcccgcgtgccgcgaaaggtatcgacatctatgcgtaagccgacctgtttcatgattttccgctgtccgtcagctcaaccgtgcgcaggaagaagtccagggtgtgttccacggtctcttccatttccaccgttggcacccagttcaggcagcgcttcgcgttgcgaatgctcggcttacgatgttcgacgtcctggtagcctttaccgtagtaatcgctgctttccacttcgcggaacccggcaaacggcgggaagcggtcgcgcagcggatggcgttcaaagcaggccagcagcatttccgccagctctttgatactcgcttcgttatccgggttgccgatgttgatgatctgcccgtcgcagcggccgtctttgttctcaatgatgcggaacagcgcttcgataccgtcgctgatatcggtaaaacagcgcttctgcttaccaccctcaatcagcttgatcggcgaaccttcaaccaggttcaggatcagctgggtgatggcgcgagagctaccgatgcgcgcggcgttgaggttatcgaggcgcggccccatccagttaaacggacggaacagggtaaacttcaggccgttcttatcgccgtaggcccagatcacgcggtccagcagctgcttggagaccgagtagatccagcgctgtttgttaatcggcccgaccaccagattggaggtatcttcatcgaagttattgtcggtgcacatgccgtacacttccgaggtcgacgggaagatgatgcgcttatcgtatttcacgcagtcgcggataatcttcaggttctcttcgaaatccagctcaaacacgcgcagcgggttgcgggtatattcgattggcgtggcaatcgccaccagcggcaggaccacgtcgcacttcttaatgtggtactcgatccactcggagtgaatgctgatatcgccttcaacgaagtggaagcgcgggttgtcgaggaagcggctgatagcgtcggagccaatgtccaggccgtaaatctcgtagttgtcgtcctgcagcagacgctcggtcaggtggttgccgataaagccgttcaccccgaggatcagcacgcgggtacggcgcttaatcgccaccaccggtttgctgctcagcaccgcgccggcaaccaggccaagcgcctgcgccagctgcgtaccctgcatataaacgccgcgctcggtctgcccggtaacgatttctaacgccccttcctggcaggcgaccaccagcggcgcaacggagatcaccgtccccgctttggcggcggccagatcgtggcgcacgcgggatttccagacgataaacttgttcgcgccggcgtagccgaacgcgcccggccacggatcggagaccgcacggacgaggttgtgcagcgtctgggccgagcgttcccagtcgaggcgaccgtcttccggcgtacggcgaccgacgtaagtcgcctggctttcatcctgggcgcgctcttcggttttgccgtcgcggatggcgggcagcgcctgagccaaaagttccgacgccgcggaacagagcttacggtgcagcgccagcgccgcgtcatccgcgccgatcgcgacgcttttctgcgccacgatattgccggcatcggcgcggttaaccatacggtgcagcgtcacgccggtttcgctttcgccgttcaccagcacccagttcagcggcgcgcggccgcggtattttggcagcagtgaaccatgcaggttaaaagccccctgcggcgcaatattcaaaatgtcatcgcacagcaggttgcggtagtagaacgagaacagcacgtccggtttaatctcacgaatacgttcgatccacagcggatgattcgcatcttccggcgcccataccgggatgccttgctcagcggcaatacgcgccacggagccaaaaaaatggttttcgccagggttatccggatgggtaaaaatagcggcgatgtcataaccggcatccagcagagactgaatacctgcacaacccatatcgtgataagcgaagactacggctttcatgaacgatcttcctcttgagatgccgtttccggctggcgaacaacacgttgaataaagtagcgagggcgggcgcggacatcgttatagatgcggccgatatactccccgagcaggcccatcccgacgaactgggcgccgataaacatgaacagcaccgcgaacagcatgaacaccccttccgccgcccactggggaccaaacaccagacgcagcactaccagcatcaggccgaaggcgaagcccagcagagcgatgacgctgccgaacaggctcagcaggcgcagcggcgtggtggtcaggcaggtcaccaggtcgtacatcaggttaatcaggcgcataaagctgtatttagaatcgccgaattcgcgctcggcgtgcatcaccgggatctcaaccgcccggcgggcaaaagtgttcgccagaatcgggataaacgtactgcgctcatggcagttgagcatcgcgtcgatgatatggcggcgataggcgcgcagcatgcagccatagtcgcccatcgctttaccggtggtgcgctggattaggcggttgatcatcttcgaggcgcttttacggaagaaggtgtcctggcggttctggcgcacggtaccgaccacgtcgtagccctcatcggccttctcgaccaggcgcgggatctcttccggcgggttttgcaggtcggcatcaagggtaatgatcaggtcaccggtaacgtggctgaagcccgccataatcgccgagtgctgaccatagttgcggttcaacaggaccgccaccacgtggctgccttcggcctcggcggcttcggtgagcattcgcgccgagtcgtcgctgctgccgtcgtcgaccagcagaatttcatattgccgtccgagcgtcgcgcaggcggtgtcggtgcggcggataagctccggcaggctctcctgttcgttatacacaggaataacgaccgagacctttttcacgggagggtagctaaacatatcaacgtcctgacagctggtgcagtgcggaaatgacccgagtgacatcgtcatcggtcatatccgggaacaacggaatggaacaaatgcgcgcgctgttccattccgtatgcggtaatgaaacttcagggaaacgctcgcggtaatacttttgcgtatgggccgcgcggaagtgcaggccggtgccaatgcccatggccttcagtctttccatcagcgcatcgcggctgatgccgcaggcggcttcgtcaacgcggataataaacaggtgccaggcgtgctgatgctcccacgacggcgccaccagcggcctgaagggcgtatccgccagctcgcgcagatagcgttgcgcaatggcggcgcggcgctgattggcgtgggcgagcttatccagctgcaccagcgccagcgcggcgttgatatccgcgagattgtatttaaagcccggcgaaatcacctccgcctgcggcgcgcggcccagggtctggcggtcataagcgtcaacgccgaggccgtggaacttcaggctgcgaatgcgcgcggccagctcgtcatcgtcggttaccaccagcccgccttcggcgcaggtcatattcttgatcgcatggaatgaaaaaatggcggtaccgcgccacccgacgtggcggcctttgtagtacgtccccgccgcgtgggcggcatcttcaatcaccggaatagcgtgacgctcgccaatcgcgcgaatggcgtcaatatccgccggtgcgccagcatagtgcacagggataatggctttggttcgcggggtgattgccgcttcaaccgcttcgggggtaatcatcaggttatcgggatcgacatcgatcatcaccggggtcgcgccgagcaggcagatcatgttcagcgtggagacccaggtctgggaaggggtgatcacttcatcacccgcaccgatacccagccccatcagcgtgacgtgcatgccgccggtcgccgaactgacggcgatggcgtgacggttgccggttaacgtgcagaacgcctcttccagcgcctgatttttcggtccagtggtgatccagcccgattgcaaaacttcacgcagcgcagccagctctgcgtcgcccatcgacgggcgcgaaaacggcaaaaaatcgctcatcatgttcctgttctgtgaatgacccgcgaaaaaacgggtcgataagaaatatcctgcacctgctgacctaaacaaaatgaaaatgaaagcgaaatcagtccgatggcgcatttcattattttgtattcagatgttattaaatttagtcagctttgcttaggataatattaagaaattaatattaattagatatgcatgatgattttgttaaaaatcattgagataggttggaatttattgcagaaaaaggcgctatagcgttcccgcttgacggagaaatagcgggaacgcattggcgaaaagtaaacggatgctcaaccagattccaataagctatctttaaacatcgttcagcaaatataaaaaatccagtcgaatcacgaaactatttcaaaatgattacaggttggcaggaaagttgtcaggtaattcattagccgggcaattaatcacttcgtcattatccgcgccgcaatcgcgcacaaaagtgatggtggcaaactcatcaatcacttctgtcggataagccggaccggcttcacgataagagaccatcagcggaatatgatcgttctggaagcagacggttttctccgggttattcattacccagcgcgggaaaaagatggtgccgtgaaacagcttatcgccgaggttaacgatcaggctcacgtcggtaccggtcggttcggtccaggaaattttgtagatgctttcgccgacgcgaacgatgtaagcctgctgatctttcacccaacgattcgccacgataccgctgtgaatgcgataatccagggtggtgccgtttttaacgtaaatttcgtagttccagccattatcataggtataaaccagatgtttaccgataaaaccgctcaggtcatgtttgtcgaatgtgctcataatctgttctcctctgtttgttgagaacaagcatactgctttaaaaaatggatgaataacgctatgtttggattaaacccattcactttttagatggattatgcacaagactacgctggaacaatgggcgctgctggagaaagttgtcgagctgggtagcttcgcgaaggcggcggacgagacccaccgcagccagtcgtcggtgagctataatctcgcgctgttgcaggagcggctgggcgttacgctgctgacgccatcgggccgtcgcgcggtgctgaccccggcaggcgagctgctgctcggccaggttaagccgctgctgcaggccttctcttatgtcgaaacccatgccgccaccctgcgagacggcgcccggacccggctggatctggtggtcgacagcattttcccacgccagcggctgttcgccattctgcgccagtttcaacagcgctacccgcaaactcaggtcaggttgaccgaagtgctggaaaacgttgaggaagagcatccggcccgcaccgaggcggacgtgatggtgctgacccgccgtcaggatattaccggccgcggcgaatggctgatgaacattgattttgtcgccgtcgcccatcgcgatcatccactctccgcactggcggggccgctggacgacagcgcgctggccccctggccgctggtgcgcatcgccgaccgcagcaacgacccgcaatcttcccgcgatgcatggacgttttccactattgatgccgccatcgatgcggtgctgtatcaggtcggatttggctggctgccggaagagcgcattggcccacagcttcaacaaggggtgctgaaggcgctgccgctgggacacggcgcgcggcgggcaacgccgctgcacctgatcgttaagcgtgatttaacacctattgatgagcaggtcgccacgctgctggatctgttcagagcgccctgatgggcttgtttacccggctcgcgctgcgcttagccgggctacagaatcactgcggtctgctcccgggggcggcgcttatcgcgccttgcccgggctacaggttccctgccgtctgtggtctggtagcccggacagatgcgcagcatcgcctccgggaaattcagcctctctgcgcgctgctcccgggggcggcgcttatcgcgccttgcccgggctacaggttccctaccgtctgtggtctggtagcccggacagatgcgcagcatcgcctccgggaaattcagcctctctgcggtctgctcccgggggcggcgcttaacgcgccttgcccgggctacgggttccccgccgtctgcgagccggtagcccggacagatgcgcagcatcgcctccgggaaatgtgccgaagctgatgcttcccggcttgcgctgcgtttagccgggctgcaggcgggttcgtaagctcatacagccaaaagagatataccgttttcttatactttcaggcccgatattgatccagcttacgccgaaagtatgatgaatctttaaaatcgtcatactttcctgtcgctgagaaaaagccttgtctattatccgcaccaccctgctggcgctattcgcctgcgcccctttgctggcctgcgccgcgtccaatgaaatcaccaccgcctggccggtcaacgtggggccgctcaacccgcacctctatacgcccaaccagatgtacgcccagagcatggtctatgagccgctggtaaagtatcaggcggatggctcggtgaaaccctggctggcaaaaagctggacccactcggcggacggcaaagtctggaccttcaccctgcgcgatgacgtgacattttccaacggcgaagcgtttgacgcccatgccgccgcggagaacttccgcgtggtgctcgataaccgccagcgccacgcctggctggagctggttaatcagatcgtcgaggtcaacgcgctcgacaaaaaccagctgcaaatcaccctgaaaagcgcctattatccgttcttacaggagctggcgctgccgcgccctttccgctttatcgccccgtcgcagttcaaagacaatgagaccctgcacggcattaaagcgccgattggcaccggtccgtggctgctgaaggaatcaaaactcaatcagtacgacgtgctggtgcgtaacgagcgctactggggcgaaaagccgcagattgaaaaaattaccgtcaaggtgatcccggacccgacgacccgcgcggtggcctttgaaaccggcgatattgacctgctctacggcaacgaagggctgctgccgctcgacaccttcgaccgcttcagccacaacccggcctaccgtacccagctttcccgcccgatagagacggtgatgctggcgctgaactccgccaaagcccccaccaacgagctagcggtgcgcgaagcgctgaactttgcggtgaataaaaaatcgctgattgataacgccctgtacggcactcagcaggtggccgatacgctgttcgcccccaccgtgccctatgccgatattggcctgacgccgcgccggtacgatccgcagcaggcgaaggcgctgctggaaaacgcgggttgggtcctgcctgcgggtaaggatattcgcgagaaaaacggcctgccgctgcgcgttgagctgtcgtttatcggtaccgacgcgctaagcaaatcgatggcggaaatcattcaggccgatatgcgccaggttggcgtggacgtggcgctggtcggcgaggaagagagcagtatttatgcccgccagcgcgatggtcgcttcggcatgattttcaaccgtacctggggcgccccctacgatccgcacgcctttatgagttcgatgcgcgtaccgtcgcacgccgattttcaggcgcagcagggattagccgacaaaccgattattgataaagaaatcggcgaggtgctgataaccaccgatgaaacgcggcgtcaggcgctgtacaaagacctgctgacccgactgcacaacgatgcggtctatctgcccatcagttacgtctcgatgatggtggtcgccagaccggagctgggggcgattccctacgcgccgatcgcgtctgaaattccgtttgaacagattaagccggtgaaaccctgatgttacgttacgcgctgcggcgggtcgcgctgctgataccgatgatcttcgccgcctcggtgattatctttttaatgctgcgcctgggcaccggtgacccggcgctggactatttgcgcctgtcaaacctgccgccgacgccggagatggtggcctcaacccgcgcgatgctggggctggagcggccgcttatcgtccagtacggcagctggctgtggcaggcgctgcatctggattttggcgtttcgttcgccacccagcgtccggtactggatgacatgctgagctttctgcccgccacgctgcagctggccggcgccgcgctggtgctgatcctcctcacttccgtaccgctgggcatctgggcggcgcggcaccgcgaccgcctgccggattttattgtgcggatcatcgcttttctcggcgtgtcgatgcccaacttctggctggctttcctgctggtgatgttcttttcggtttatctgcaatggctgccggcgatgggctatggcggctggcagcacatcattctgccggcggtgtcgatcgcctttatgtcgctggcgatcaacgcccgcctgctgcgcgccagcatgctggaagtcgccgggcagcgtcacgtaacctgggccagactgcgcggcctgaacgacaggcaaaccgagcgccgccatattctgcgcaacgcctcgctgccgatgattaccgccgtggggatgcatatcggcgagctgattggcggcacgatgattatcgagaatatctttgcctggcccggcgtgggccgctacgccgtctcggcgatttttaatcgcgattatccggtgattcagtgtttcaccctgatgatggtgatcgtttttgtggtctgtaacctgatggttgatctgctgaacgccgcgctggacccgcgcattcgctgccatgaaggagcgcgctcgtgaactttttcctctcttcacgcgggtccgtccgcatttctttgcttatcatcgccctgctggcggtcgttgcgctcaccagccagtggtggctgccgtacgatccgcaggcgatcgatctgccttcgcgcctgctgccgcccggcagccagcactggctcggtaccgatcatctggggcgcgatatcttctcgcgtctgctggcggcgacccgcgtatcgctcggctcggtgatggcctgcctgctgctggtgctggcgctgggactcctcgtcgggggctgcgccgggcttatcggcggccgcgtcgatcaggccaccatgcgcatcgcggatctgtttatgaccttcccgacctcaatcctctctttctttatggtgggggtactgggaaccgggctgaccaacgtaattatcgccatcgccctgtcgcactgggcgtggtatgcgcggatggtgcgcagcctgacaatctccctgcgccagcgcgaatttgtgctcgccgcgcggctttccggcgcgggacacgtgcgggtattcgtcgaccatctggccggcgcggtcattccgtcgctgctggtgctggcgaccctggatatcgggcatatgatgctgcacgtcgccgggatgtcgtttctcggcctcggcgtcaccgcgccaaccgccgagtggggggtgatgattaacgacgcccgccagtatatctggacccagccgctgcaaatgttctggccgggactggcgctgtttatcaccgtcatggccttcaacatggtgggcgacgcgctgcgcgatcgcctggatcctcatctgatcgcggagcacgcccactaatgccgcaacaaattacactgcaaaacatcgtcttacaggccgagcgtccgctggtgcacggcgtatcattgacgctcaaacgcgggcgcgtgctggcgctggttggcggcagcggcagcggaaaatcgctaacctgcgcggcggcgctgggcattttgcctcccggcgtacggcaaacggcggggatgatcctcgccgacggccagccggtctcccccggcgagctgcgcggcagcaaaatcgccaccattatgcagaacccgcgcagcgcctttaatccgctgcacaccatggcgacccacgcgcgggaaacctgccgggcattgggtaaacccgcagacgacgccacgcttacggcggtactggaagccgttgggctggaggaggcgcagcgcgtcctgaagctttatccgttcgagatgagcggcggcatgctgcagcggatgatgattgccatggcgctgctgtgcgaggcgccgtttatcattgccgatgaacccaccaccgacctggacgccgtggcccaggcgcgcattctcgatctgctggcaggtgttatgcaaaaccgtgggcccgggatgctgctggtcactcacgatatgggcgtcgtggcgcggctggcggacgatgtggcggtgatggatagcggctgcattgtggaacagggggatgtcgaaagcctgttcaacgctccgcagcacagcatcacccgcagcctggtggcggcgcatctcgccctctacggactggagctggcctgatgacattactgagcgtatccgcgataacccatcaatataccgattcaacggtgctaaaagaggtctctttagcgctgaaaagcggtgaaaccgttgccctgctgggacgcagcggctgcgggaaaagcaccctggcgcgcctgctcgttggcctggaatcccccactcagggcagcgtctgctggcggggagaaccgctctcccggctcaatcgcgccaagcaaaaggcgttccgtcgggatattcagatggtgtttcaggacgccatcagcgcggtgaatccgcgtaaaacggtacgcgagattttgcgtgaacccatgcgacatctgctgtcattgacgaaagcggaacagctggcgcgggcaagcgacatgctcagggcggtggatctcgatgatggcatgctcgataagcgccccccgcagctgagcggcggacagctacagcgcgtctgcctggcgcgcgcgctgtcggttgagccgcagctgctgatccttgatgaggcggtgtctaacctcgacctggtgctccaggcgggcgtcattggtctgctcaaaaagcttcagcgacagtttggcaccgcctgtctgtttatcacccacgacttacgtctggtggagcgtttttgccagcgggtgatggtgatggatgaggggcaaatcgttgagacgcaggtcgtgggcgacaaattaacgttttcttcccacgccggtcgcgtgttacaaaatgcggtacttcccgcctttcccgtgcgccgtaataaggtttaaaacagatgcaacgtatcacgattactcttgatgacgatttactcgacacgctggatagcctgagccagcgccgcggctatcataatcgctccgaagccatccgcgatattctgcgcggcgcgctggcccaggaaagcgctcaggagcacagcacccagggcttcgcggtactctcctatgtttatgaacatgagaagcgcgatttagccagccgtttagtttccacccagcatcaccaccacgacctctccgtcgccaccctccacgtacatatcaaccatgacgactgtctggaaatcgccgtgctgaaaggcgatatgggcgacgttcagcattttgccgatgacgttatcgcccagcgcggcgtgcgccacggccatttgcagtgtttgccaacggagaaggagtcaccccactcatagcagtgggatgcgataaatgactctttaacgcgcgatcgggactaacgccattatggcgactcgttggcccatgcgcctcgtatcggttttgccagcagggcaagaacggcaatcatgctgatttcaatcgaaaacgaccagcaaatatgtccgagggtttcgctccacagctcgtagccattcaggttccacagccacccggtttccccgtttaaataggcgggatgcctgaagcccagcgcgggaatgaggaagccgtgcataacgagagtaataatcagaccataggccgcgccgtaccaaagccggattttcggccagtatgcggaaatgaagacatagagaaaggcaaaagcaaagctgaacagccagtggtaaagcatgacggcgccggggattgtcaccccctgataaacgtagtccagcgagtgtgaattaatgccaagccagccgagccaggcgtcgatatgcgccgccgggggcgatatctcgcccgccacgcggggcggcatattagcttccgttcccgacttcaccagagagctaatgaaccctccaatgagcgtcgtccagataataacctgaagattaatcctgcttttcaacataacagcgttcctcttaaatatcgcttatacgatgggtcacctcagttttttcaaccaacaatctcgcgggaaatagcatttataacgcatccattgctaagtatagtttgaaaaaattttgttcaccctaagagggaaaaatccccgtatcgccctgatcgcaataaactttcgccttttctcaacaattaataaaccacatgaattatatgcttggttaatcatctctcttcgcgaataatcaggcctcatttaacgatctcgttatggcgaggctcctgcataaacataagttaccgccctgttggtatcgagagagaccactcagggaaatacaggcttccatcgaatcaaggtgttgccaaggtaacttctgacggcattcatgccgggcagatacgttgtgcagtgctaaaaccaggacgtagggatctgcctgtgctcatcctgtcttgttcgcccctatgagtgattttttatagggaattacaccatgtcttccattcaactgtgcgccgcacatcaggctaccgcagcgttcgacggcgacgcgatcgcccagtacatgcgtaccgatttcattaccctgccggaacatttcagcgttcatgaagcgcgtgagctgttcgtttctcagctggccagcgatgagatccccggccaggtttttgtcgtcgccgggaaaaaactgcgcggcagtttatcgattaaaaagctgctgcaggagagcgataccgcccagtccattcgttatttaatggatagctgcctgtttcgcgtcaggcctgacgacccgcggccgcaggtggtcgccgagctggccgagcgcgggctcgacctcgtgccggtggtcgaaaaaggcgagctggtcggctgcctgatggaaaaagagatcgcgcatctgttggaagatgacgtgaccgaggatgctcagcgtcagggcgcgacgctgccgctggaaaagccctacctggaaaccagcccgtgggcgctgtggaaaaaacgttcggtatggctgctgctgctgtttgtcgccgaagcctataccagcagcgtgttgcagcattttgaggaagcgctggagtcggcgattgcgctggcctttttcattccgctgttgattggtaccggcggcaatagcgggacgcagatcacctccaccctcgtgcgttccatggcgctcggcgaggtgcggctgcgcgatatgggacgcgtaatccgtaaagaggtctcaacctcgctgctgattgccattacgctcggcctggcgggctgcctgcgcgcctggatgatgggcatcggcatggagatcaccctgattgtcagcctgacgctggtatgcattaccctgtggagcgcggtggtgtcgtcggtgatccccctgacgctcaaacgcgtcggcatcgacccggctgtagtttcagcgccgtttatcgccacccttatcgacggtaccggactgattatctacttcaaaattgcccagtatttcctggggctgaactgattattttgcccggcggggaggacttgccgggctgttttattcccgcccgaatatccgcaatcgcattaagcaatctcagtaactctggagcaagccgataaaaagcgtgtcctttttccgttaagataacttttctgatattcctgccgcgcttaatcaggttgaaacccagttcattttcaagcgcacatacgctggttgttatcaacgaaggcgcaatactcagccgctgcgatacaaaatgaacactcccctcccgaaccataagcatgaatatctccacctgtgatttattcattgccgaaacctctccagattaacctttggcttacgttttaagttgtccaccgggcaatgtcaatcgctacaagaaaatgctctccgtatataaataaaataaagtgtgaagctcgccattcgcacatttaattatgcatttcagccatttcacaattaaataaccggcctcactccggcgttcaggtatgtgaagaacatcaccacaactcgttgaccacaaaaacaaaatacacatatatatcaaagcattacaaaaaatacacatcttgcatgaatgtatggcacacgccatgcaattacctccacgtaatcaacactggagatagttaaatgacgtacaaaattttactcccgcaggaaatcatggcagaagggagagaatatctggaaagccgcggttatcaactgattaacggctcagggatggaagaagaagatatcattcgcgacatcgtcgattgcgacggtattatcgtccgcctttcaaaaatgtccgaccgcgtatttgaagcggctaaaaagctgaaagtcgttgcgcgtcacggtgccggttacgatacggtcgatctggcgtcggctaaacgtcacggcgtcgtggtattaaatgcgccaattgctaacagcatgtccgttgccgaactggccatattttatatgctgcactgctcgcgtaatttcaagctggtacaggaaaagatgcttgaagattattactgggcgaaactgcgcacgccaaaagtggagctggatggaaaaacgctgggtttaattggcgtcgggaatatcggttcacgcgtggcaatcaaagcgctgcatggctttaatatgaaagttatcgcctatgacccgtataaaacccagcagcagatccccgaaggcgtagagcttaccaacgattttgaccgtattttcaaagagagcgacttcgtttctctgcactgtccgacgacggcggaaaccaccggttttgtcggagagaaacagttttccatgatgaagcctaccgcctatttcattaataccgcgcgcgggaagctggttgatgaaaaagcgctgtatcacgccttgagcacccacgctatcgccggggcgggcgtggatgttttaaagaaagagccgtttgatgccaacgacccgattttctcgctaagcaatatcgtgattgccccgcatattggcgccgccaccattgaagcgaccgacagagcctcgctccattccgcgattggcattgatgaagtcttatccggtaagaaaccgtcctggccggtcccgggtttttaaggagaaaaaaatgactattggtaaccgtatttttttaaagcgtccgaccagcagcgtcgatcttcttaaagaatttgaacagctcccggcggcgaatattgctgacaccatgaaccgtattgccgttctgggtaacggcattaaacgtatctcttcgccgaaaaagccgattatggcggggttcgccatcaccgtgaaagtccgcgcgggcgataacctgatgctgcacgccgcgctggatatggcgggtgagaacgatgtgattgtggtctccaacgaaggcgaccgttcgcgggcattaatgggcgaaatcatggtggcctatgcccactgcatgaaaaaaatcgccggtatcgtgctggacgggcctatccgcgatatcgatgcgctgtcggttctcgattttccgctgttcgctaccggctctaaccccgcaggcccgtttaaacaaggtccaggggaggtgaacacgccgatcgccgttggcggcgtcgcggtttgtccgggcgacctgatcgtcggcgatgcggatggcgtgattgttattcccctcggcgacgcagaagccgtactgaataaagccaaagagtatgcaaaattcgatgccagcaaagtagaggccgccaaaaacggcaccgcgaatcgcctttgggtcaaaaaatcactggatgagaccggcgttgagtttatcgacgacatgtatcgttaatttgattaaataatatcaggccgcggcgccctgacgggccgcggctttaaagcaaaggtaataaaaatgctttatttaaaactcttgcccattatctttttccccgttttattttggataataccgcacccggaaggcgtctccgcaccgacctggcatatggttggcatctatctggcgatgctgtgcgggctggttttgcgcccgtttaccgatgcggtcattatgctgattattctcgggtttgcctctctggttctcgaccccgctcccctgtttgccggttttggcagccctatggtctggtttattatcagcgcctttattatttgcaaagcgtttgttattaccggactgggtaaacgtatcgcctatctgctgctaaaacgctatggaaaaaataccctcaccctgggttatctgatgatggtgacggataccgtactggccccggcaacgggttcaaatatgtcccgttcgggaggcattacctatcccatcttcaggaacatcgccgaagcgctgggctcgaagcccgacgacggtagccgcaaaatcggcgcctatctgaccatcctgatgtacgtcgtctcaatgggaacctccagcctgtttctgacggggatggcgaccaactcaattaccgtctcgctggccaacgagatcatgaaggtgaatctcgaatggatgacctggtttaaagccgccgtggtgccagccggactggtgctgctgctcgcgccgtggatactgtataaaatctacgcgccggaactgaaagttatcgataacgtcaatgaaattgccgagaagggcctgcgtgagctgggtccggtaaaacgtgaagagaagctgctgatcgtgttctttgtcctgggcgtgctcggctggatgaccggttccatcaccggcatcgcctttattcccgtcggcctggcgttcctcgcctgtctgctgcttttcggcgtgctgagctggaatgacgtggtgagcgaaaaatcggcctggcagaccttcgtctggtatggcgcgttttatggctgtgcggttgccctatcaaaaggcgggttctacgtctttctggtggacgttatcaaaaactatctcgacctgtcgcatctcaatgaaatcagcgcgattgccgtgctggtctttatcagccttgccgtccgctatttctttgtctcgaacagcgcgttcgtcgtctctttctatccggtactctttaccctgggaatgacgacccaggcgcacccgatgtacgtggcgctttctctggctttctccgcaggctatggcgcactgctgacgcactacggcaacggcgcgggcgtatttacgttctccagcggctacgtcccgcaaaaaacgttctggatgctgggcaccatcatggtggtggtcaacgtattaatcttcttcctgatcggtattccctactggaaatttatcggcatttaacgggagcataaaatgaaactggatattctgattaaaaacggtctggtcgccgatcccgaaggtcatgattatattaatcgtaatattggcgttatcggcgatcgcatcgtggacttaaataccgttgacgatttgcaggccgaaacggtgattgatgccgcgggttgtatcgtgctgcctggcttaatcgacttccatggtcatgtttttcacggcgggaccgccatcagcgtcaaccctgacatcgtatgcttgcccaacggggtcaccagcatggtcgatgccggcagcagcggctgggtgaattatccgctttttcgcaatagcgtgattcatcctgccatggtgaaaatcaaaagctatttgaacgtggtcaacgtcgggctttccaccctcgggggcgggccgaccgggtatctggaaaataccaatccggcgaattacaacgaggagaaaatcgcccaaacgctgaatagcaacagagacaatattctgggattgaaactacgctacagccaggatatcgccaaagggaaacagtacgccagcgaccctcttctctctaccgtctccctggcgcgtaaactggataccacgatttgcgttcacgtcacggactctcttctctgcgccgatgaactgatccgctattttaatgccgatgatatttacgcccactgcttccacggtaccggccactcgattctcaatgaacagggcgaggtctatgcggcaataaaagaggcgcagaccagaggggttatcttcgactgttcaaacggcgtggcccactttgattttcacgttgccagaaccgccatggagcagggattttatcccgatatcatcagcaccgatctcaccctgagaaatagcttacggacggataaggtctacagtctgctccacgtcatgtcgaaatatctcaatatgggaatgtccttcttcgatatcgttcgcgcggtaaccgccacgccggcccgcttaatgaaaatgcaggggcaaattggtaccctggcgcccggcgccagtgctgatatttcgattgttaagctgcgaaaagagaacgtcatttttgaagatacccacggggtcaaactcgaaggtgaccgttatatcgataactgcgctaccttatgcaacggtcaaattgtctaccgccgcctgcgtttctaatcactaaaaacttagccttacgcatttgctatgcgtaaggcttttattcttaatatcgtattatatgaccaccctcattgattctccctgtgctcaccatataataaacattgcaaacccagaacacctgagcgaataatatatgaagaataatgaaattgtcattttttcagtttccaaaacaataacccaacgcatcatgaatgttcttattgagaggaagctcgatgttccggtatatgaatttcgttattctgacgttctcgataaagcgaatgagatgatccagtccggcgctaagataattattagccgaggcggcaccgccgccctcctgcgtaacaatattagtatcccggtcattgagatcgcccatgattttcacggcgtttatcgcattttacaacaggccaaaatcaaatcacaaaaaatcgccgcggttggtttcccccaattttgtaatgccttacgtcattatcagaacatgactaacgaagagtttaaaatttgccaggtatacaaccacaatgatattgaaaacgttataaaaaatctttcagagaacgattaccatacggtcatcggcggcctcacggttgctgaaatggctaaaaaatataacctcaatgctattatgggagacaccgataatatttcgattgagcaggccatcaatgaagccgatagcctattaaaatatctcaacagagaaaataccaagctcatcatgagccacgccgcgctgaatcaagcacgtgagggcatcatgtgtattgatcagttgggtgagatcatcaatattaatgctatcggcctgagcttattccagtgtcatgtcggagataaaatattcaaaaaagaggcatttaaagatatttaccccagcattattaacgaattagatattaaagaacaggccattgatattaacggccaaactatttacatttccatacgtcatttttccaaccgccaaacatcttatagcattattacaggattaaaccaggaaagttcgctttggcaaaatagtatcagcaaaaaaagtaaactccgcggtttttccacaacctggtctttcgacgacattattggccagtctccggcgatacgcgatgtaataaaaaaagctaaactgtgcgcccgccacgaacttcccattcatattttgggcgataccggcacaggtaaagagcttttcgctcagagtattcataaccatagcgccagaagccacggcccttttatcgcgattaactgcgcggccattcccgagagcattctggaaagtgaactctttggctatgccgacggcgcatttaccagcgcgcgcaagggcggaaaaccgggggtgtttgaaatggcgatgaacggcacggtgtttatcgatgaaatcagcgaagcgccgttatcggtacaggttaagctgctgcgcgtgttacaagagaagcaattctctcgtctcggcggcgatacgctgatcaccgccgattttcgcctgatcaccgccagcaataaagatctgcgccagctcgtcgccagcggtgagttcaggcaggatctgtactatagaataaatattcttgagttgagtctaccggccttacgccaacgaccgggcgatatcatgttgttgattcagcacctgctttatcagcaaggtaggcaaatcacatttacccccgacgcggtggattttttgcatcgctatagctggcctggcaacattcgtgaacttcaggcggttatctaccggctcatcgtcctgctggacatcgatcgagtgagcaaagacgttttgctgcagatcggtcaaatttcaccggatgacgccaacgagagctctcacttcccggccgcgggcgtggcatcagatgaaaccgatttattaaagaaacaagagaaacggctgattacccatgtcatagaaaaaaccgacggggacaggaccaaagcatcggtgatgctcggcatcagccccacgaccctgtggcgcaaattaaagcagcacaatatcagcggataaggcggagccgggtccgctgatacagagcaggcggttatttctgttccgctaaagcctgcgcgcatgcccaggctgacgcccacgcccactggaagttatagcctcccagccagccggtgacgtccatcacttcgccgataaagtacagaccgggcaccttgcgggcctccatggtgcgcgaagagagttcgttggtgtcgacaccgccgagggtcacttccgccgtgcgatagccttcggtgccattcggctggacgcgccacgcggtcagcgtctcaaccagcgcctgctgctcgcgaacgttaagctgtttcagggtgacgtccggcagttgccccagctgctgcaggcactcgaccagccgctttggcagctgcattgccagggtgttcttcaggctctgattgggatgcgccgcgcgctgctcgttgaggaagtcatcaagatggcaatccggcagcagattgatgctgacgaactctcccggctgccagtagctggaaatttgcagtaccgccggcccggacagcccgcggtgggtaaagagcagattttcccggaagacggtcccgttttccgccgtgatggtggacggcaccgacaccccggaaagcacctgcagctgttcgagcagcggcttatgcaaggtaaacggcaccaggcccgcgcgggtcggcagcaccttcaggccaaactgctcggcgagcttatagccaaacggcgaggcgcccaggccgggcatggatagcccgccggaggcaaccaccagctttttcgccgccaccgtctcgccgttaagctgtagcgtatagccctcatcatcccgctctacgctgataatttcgctacgcaggcgaatgtgtacgccgcctttttcgcactcggccagcagcaggttaacgatttgctcggcggaatcatcgcagaaaagctggcccagggttttctcatgccaggcgataccgtgtttgctaaccagatcgataaagtcccactgggtgtagcgcgccagcgcagatttgcaaaaatgcgggttttggctgagatatgccgcgggttcgatatacatgttagtaaagttgcagcggccaccgccagacatcaggatcttccgcccgggctttttgccgttatcgagcagcagcacccgacagcctgcctgccccgcctgcgctgcacaaaacattcccgccgctccggcgccgattacgatggcatcaaacctttccacacaacattcctcatatcccgattgtcgggaattgtaaatttttcattctggtcgcaccagactgaaaaaaacagatttgcgtacctcattgaaagatataggaatactcccaacaaggtaaaacttaaacaggaagaaaatcaaaaaaagtctatatttcactttgcccgcgccgcgaaagtcactgataatgcgccgcgttcatgtcctcaaaatggcgtaacgtcctatggtacatttatttgccggtctggatttacataccggattactgttattgcttgctctggctttcgtgcttttttacgaagcgatcaatggttttcatgataccgcaaacgcggttgcaacggtgatttacactcgcgcaatgcggtcgcagcttgctgtggcgatggcggctctttttaacttcttcggcgttctgttgggcggtctcagcgtagcctatgccatcgtgcatatgttgccgaccgacctgctgcttaacatgggttcagcacatggcctcgccatggtcttttccatgctgctggcggcaattatctggaacctcggcacctggtacttcggccttccggcctccagctcgcacaccctgatcggcgcgatcatcggtattggtttaaccaatgccctgatgaccggtacgtcggtggtggacgcgctgaacatcccgaaagtcatgggtatttttggctcgctgatcgtctcgccaatcgttggcctggtcgtggcgggcggcctgattttcattctgcgtcgctactggagcggaaccaaaaaacgcgcccgtatccacctgactccagccgagcgtgaaaagaaagacggcaagaaaaagccgccgttctggacgcgtattgcgctgattttgtccgccattggggtcgcgttctcccacggcgcgaacgatggtcagaaaggcattggcctggtgatgctggtgctgatcggcgtggctccggctggcttcgtggtcaatatgaacgcttccggctacgaaatcacccgtacccgcgatgcggtcaacaacgtggaaaccttcttccagcagcgtcctgagctgttgaaaaaagcgaccggcgccgagcagctcatcccgtctccggacgcaggggctgccgcaaacggcgagttccactgccacccggcaaacaccatcaacgcgcttgaccgcgtgaagacgatgctgaccggtaccgaaagctacgacacgctctccgtggaacagcgtagccatctgcgccgtattatgctctgcatctccgacaccactgacaaagtggctaagctgccggaagtgaatgctgacgataagcgtctgctgaagaagctgaaaaccgatatgctgagcaccatcgagtacgcgccaatctggattattatggcggttgcgctggcgctgggtatcggcaccatgatcggctggcgtcgcgtggcgaccaccatcggcgagaaaatcggtaagaaagggatgacctacgcacaaggtatgtcagctcagatgaccgccgccgtatcgattggtctggcgagctataccggtatgccggtttccaccacccacgtgctctcctcctcggtagcggggacgatgctcgttgatggcggcggtctgcagaagaaaaccgtcaccagcatcctgatggcctgggtactgaccctgcccgcggcgattctgctgtccggcgcgctgtactggctctcgctgcagattatctaagcgaatatcagaaacaagaaagataaacgggtcaggaaactggcccgttttttttgtatcgtgaagctagtgccagatagccagagcaatcatgctgaccaccaccaggccgcatagcgcgctggtgagaataaactgccgacgaacccgctcgcagcggcggataaattcatcgtcgtggtgatcgcggtagcgctgggcgtagatgtaccacaccaggcgcacctgtttgccgggctgcccgtgcgacgtaaaaaaaccgccgccgtcgacatattgatagagcaaagggtcacaaccacgtagcacaacaagcaatgcacgcagcgacgagaagtagcgtgccatattcactacacatacgatacacagggcccaaaacagcgcaacagtgctgatcatacctcctccccggcgacccgtcctcggaggctccctccgggactaccgctccccaatatcaaaccgactgtactgtgaaagagtgcgattccgatcacgtttatttatccgaccggctcattaaatagtgtaggagatcagttaatttttttaccacaacgttaatcattatcaatgcataagtcggatatatttgtttaactattcgctgaacaaggtggattgacggatcgcgaggggcgctataaggtagaaatatcttctacaattaggtccttaaggactcccccccgcgaatgtagcacgcaggacgcgggcgaagcggcagcgctggctgtcaggtccaacggtcatcgacaacttatggaaggagtaacaccatggcttacaaacatattctcattgcagtagacctgtccccggaaagcaaagtactggtagaaaaagccgtttctatggcccgcccctacaatgcaaaagtttccctgatccacgtggatgtgaattactccgatctctacaccggccttattgacgtcaatctgggcgacatgcagaaacgcatctccgaagagactcaccacgcgttaagcgagctgtccaccaacgcgggctatccgatcactgagaccctgagcggcagcggcgatctcggccaggtgctggttgatgcgattaaaaagtatgatatggacctcgtggtttgcggtcaccatcaggacttctggagcaaactgatgtcctcggctcgtcagctcatcaacaccgttcacgtggatatgctgattgtcccgctgcgcgacgaagaagacgaataacaggccgttatttcatttcgctgatgaccaacgcccgccaacgcgggcgtttttatttcccccacccgccgcaaaaagcatataaatccaaataatcaccacaatgccaggctgatcaaccatttcaaaagcaatatagccatataataattcgccaaaatagataaacatcatatcattacgcaaaattaacctttttcagcgcgttttggcatacgcgttcatacttttccggacaggacttaaaggcgaagaaagatgaattcaaccgcaccgacaggcttgctgcagcaacctcgcccattcttcatgatcttctttgtggaactatgggagcgatttggctattacggcgttcaggggatcctggccgttttctttgttaaacagctcggtttttctcaggagcaggcgtttattacctttggcgcgtttgccgcgctggtatatggccttatctccatcggcggctatgttggcgatcacctgctgggtacgaaacgtacgctggttctgggcgcgattgtgcttgccgcaggctactttatgaccggcctgtcgctgctcaaacccaatctgattttcatcgcgctggggaccattgcggtgggtaacggcctgtttaaagctaacccggcaagcctgctgtccaaatgctatccgccaaaagatgcccgcctggatggcgccttcacgctgttttatatgtcgatcaatatcggttcgctgctgtcgctgtcgctggcgccggtgattgccgacaagttcggctatgcggtaacctacaacctgtgcggcgccggtctgatcgtcgccctgctggtttacttcgcctgtcggggtatggtgaaagatatcggctctgggccggaccacaaaccgctgagcctgcgcaatttactgtacgtgctggccggtacggtggtcatgatttttctctgcgcctggctaatgcataatgtcaaaatcgccaatctggtgctgattatcctctcagtggtggtgacgattttcttcttccgcgaggccttcaagctggataaaaccgggcgcaacaaaatgttcgtcgcctttatcctgatgctggaagcggtgctgttttatattctgtacgcgcagatgcccacctcgctcaacttctttgctatcaataacgttcaccatgaaatacttggtttcgcgattaacccggtgagctttcaggcgctaaacccgttctgggtggtggtggccagccccatcctcgccgctatctacacgcgtttgggcaataagggcaaagacctgactatgccgatgaagtttacccttggcatgttcctgtgcgcgctgggctttctgacggcagccgcggcgggaatgtggtttgccgacgcccaggggctgacctcgccgtggtttatcgtgctggtctatctgttccagagtctgggagaactgctgattagcgccctggggctggcgatggttgccgcgctggtgccgcagcatctgatgggctttattcttgggatgtggtttttaacccaggcggccgcgttcctgctgggcggctacgtggcgaccttcaccgccgtaccggataatattaccgacccgctacagacgctgccgatttataccgatgtcttcagcaaaattggcctggtgaccctgggcgtaacggtggtcatggcgatcatggtgccgtggctgaacaggatgattaatacaaaaagcgcgtaaaaacggagcggtcgacgaggtttcccggattgcggctaacgccttatccgggctacagaacccccagatcgcaagaacccgtagcccgggcaaggcgcatcgcgccgccctcggggaaagggccctgacgcaggttgcttacccctgcggctcaatcgccgttccggcatagatatcaaaccggtggcctttggtcaccaccgcgttaggcgtcgcgacatccgccagcggcggcgcgtagtccgggcgcttaaccaccacccgtttggtcgccagctgacgcgccggcgccagcagaccgtcggcgtctaaatccggccccaccagcgactgaaatacccgcatctctttcttcaccagcgcgcttttctgcttatgcggaaacatcgggtcgagatagaccacctgcggacgcggggtgatatcggtcagcgccgtcaggctggaagcgtgaatcagccgcaaacgctcctgtaaccaggggccgatttcagcgtcggcgtagccgcgcgccaggccatcgtcgagcagcgcggcaaccaccgggttacgctccagcatccgcacgcgacagcccacggaggcaagaacaaaggcatcccttcccagaccggcggtcgcatcgaccacatccggcagatagtcacctttgattcccaccgcttttgccaccgcctcgccgcggccgccgccgaacctgcgccggtgggccatggtcccaccgacaaaatcaacaaagatgccgccaagcttcggttcatcgcgcttgcgcagctcaagatgcgccggcgtcatcaccagcgccatcgggttgtcctcatcctgctccagcccccagcggtcagccagaacagataaggcgccgtctccggcgcccgtttcatcaattaaacaaattttcacaacagggttaactcttaataccgtaatgctcaagcatcgcgtccagctgcggctcgcgaccgcggaagcgtttgaacaggaccattggctcttccgaaccgccgcggctaaggatgttgtcgaggaacgactggccggtttcgcgattgaagataccctcctcttcgaagcgcgagaaggcatccgccgccaggacgtcggcccacagatagctgtaataacccgctgcgtatccgccggcgaaaatatggctgaaggcgtgcgggaaacggccccacgacggcccggggatcagcgccacctgctgcttaatttccgccagcgtttcgaggattttcgcgccctgctgcgggctgaactccgcatgcaggcggaagtcgaacaggccgaactccagctggcgcagaataaacatcgccgcctggtagtttttcgccgccagcattttctccagcaattcctgcggcagcggttcgccggtttcatagtggccggagataaaggccagcgcttccggctcccagcaccagttttccataaactggctcggcagctcgaccgcatcccacggtaccccgctgatgccggacacgccggcggtgtcgatacgggtcagcatatggtgcagaccgtggccaaactcgtggaacagggtgatcacttcatcgtgggtgaacagcgccggcttaccgttgacgggacggttaaagttacaggtcagataagcgaccggcttttgcagcgagccgtcaagcttgcgcatctggccaacgcagtcatccatccacgccccgccgcgtttatgttcgcgagcgtagagatcgagatagaagctaccgcgtagttcatttttttcatcgtaaagctcgaagaagcgcacctccggatgccagacgtccacatcggtacgctctttcgcggtaataccgtaaatacgcttaaccacctcgaacaggccgttaaccgctttgttttccgggaagtaggggcgcagctgttcatcgctgatgctgtaaagatgctgcttctgtttttcgctgtagtaagcgatatcccacggctgcagttcatccacgccgaattcggctttggcgaaggcgcgcagctgggccagctctttctcaccctgcggacgggcgcgtttcgccaggtcggtcaggaagtcgagcacctgctgcggattttcggccattttggtcgccagcgacttgtcggcaaagctgtcaaagcccagcagctgcgccagctcgtggcgcagggcgaggatttcggccattaccgggctgttgtcccattttccggcgttcggcccctggtcggaggcgcgggtggaataggcgcgatacagctcttcacgcagcgcctgattgtcgcagtaggtcattaccggcagatagctcgggatatccagggtcagcagaaacccttcctgctctttggcttcagcctgggctttcgctgcggcaagcgcgctttccggcatgccggagagctcagattcatcggtgaccagcttggtccagcccatggtcgcgtcgagcacgttgttgctgtactgattgcccagctcggagaggcgggcggcgatttcgccgtagcgtttctgctgctctttcgccaggccaataccggagagttcaaaatcgcgcagcgcgttatccaccgcttttttctgcgcggtattcagggtggcgtaatggtcgccgtcgcgcaggtcgcggtacgctttgtacaggccttcatgctgcccaacccaggtgctgtactccgaaaacagcggcagggtctgctcgtaggcttcgcgcagttccggactgtttttgaccgagttcagatggctgaccggggaaaaaatacgccccagcacgtcgtctacttccgccagcggctggcaaagattttcccaggtatacggcgccccttgcgccaccgcgcgctctaccgccgcccggcaatcatccagcgctttagtgaccgcggggaccacgtgctcgggtttgatggcagagaatggcggtaatgaaaaaggcgtcagtaatggattggtcatatgcgcagtcctgttgaattgggtgaatgaagcgcgcgtccggcgctatagcatgagatctagaatgggggatagtttgctgaatttcaatgtcaggcgccgcgcgcaggcgggtattactgcgataagtctggccgttgtggccagagcgcataaaaaagccgggttcgcctcgcggcgacccggctcgttttaggcggacaagcagcttataccaccatccccagcagcagacagcctaccaggccgcacactgagataatggtttccagcaccgaccacgacttaatggtctcgccgatggtcaggttgaagtattccttaaacagccagaagcccgggtcgttaacgtgagagaagataacgctgccggagccaacggcgatcaccatcagttccgggctcacgccggtggtggcgatcagcggcgcggcgataccgcccgcggtgatcgccgcaacggtggcggaacccagcgcaatacgcagtaccgcagcaatcgaccatgccataaacagcggggacatattggattcatgcatgatagaagcaatgtatttatccatgccgctatcgaccagcacctgcttgaaggcgccgccgccgccgatgataagcagcatcatggcgataattttgatcgaggaggtcagcgtatcgttaatctgctccatggaacgaccgcggttaagaccgaaggtgaacatggcgatcagtaccgcgatcagcgtggccatgaccgggtcgccgaagaattccgcgatcggcaggaaggcatgacctttcggcagaaccatttcggccacggcgcgcatggccatcagaataaccggcaccagagaggtccagacgctgacgccgaagcccggcatctcttcctcagtgaacgttttcgggttatgcaggccttccggaatcggcttatcgatacctttcaggaagcgtgcgtaaaccggccccgcgaggataaccgtcgggatcgccagaatcgtaccgaacagcagggttttacccatgtcggcatggaaaatagtggcaatggccgtcgggcccgggtgcggaggcaggaaaccgtgcgtgacggagagcgcggccgccatcgggacgccgatatagagcagcgggataccggcggatgcggcgatggtaaagaccagcggcagcatcagtacgaagcccacttcatagaacagggcgaagccgacggtaaagccggtgagcacaaccgcccattgaatatgttgtttaccaaatttggcaatcagcgtggtggcgatacgctgcgcgccgccgcagtccgccagcattttaccgagcatcgcgccgaagcccatgatcagcgcgaggctgccgagggtccccccaacgccgtttttgatggagacgataactttatccagaggcataccctgcatgagcccgacggcaagtgccaccagaaccagagcgataaacccgttcagcttgaaacggatcatcagcaacaataacagggcaaccccgatagcaacgatgactaatggcatgatttacctggccttaatttgttatgggtaacgtcatagtttcaacattgacttcatccgttccgaccggaacaaaaaatgtctgacgccgtagaagctggctttatccttacccagagaaaggatagctggctatttttttatctgtggcgcctgaagtgaatgatacgggtaacatatgaagtttgagaatcacctgggcggtgaaaatttcaaatatgagacttaagtcatactctttcccgggtttctgccgggtcgcttagcgggaaatgttgcgcgggaacatgaggggagtcgcccggccgcgaaaaggctgccgggcggggaaatcagtagtaggagtgctcgccgcgctggtgttcagtcagatcgcgtacgcctttcagttccgggaactcgttcagcatctgcttctcgatcccctctttcagcgtcacgtcaaccatcgaacagccgttgcagccgccgccgaattgcagaatcgccaggccatcgtcggtgatttccatcaacgtgacgcgcccgccatggccggccagctgcgggttaatctgcgactgcagcaggtactcaacgcgctccatgagcggggcatcgtcggacactttgcgcatcttggcgtttggcgctttcagcgtcagctgggagcccagctggtcggtaacaaaatcgatttcagcgtcttccaggtacggcgcgctaagctcatcgacgtaggcggtgagttgctcaaacttcagcgcggtatcggaatcttccaccgcatccggtgggcagtaggacacgccgcactcggcgttaggggtgccgggattgatcacaaatacgcgaatttgtgtcccttcttcctgatttgccagcagtttggcaaagtgcgcttgtgcagcatcggaaatacggatcatagcgttggcctaatagttgactattttactgggttattatacgcccatcagcaggggtctacaaggtacggcatatacaccatacctgaaccgtcgcggcgccgtttcgcaaaagcaggcgggatatctcggcgacggtgcttccggttgtgacgacatcatccacaatggcgatatggtggccctggagcgacaattcaagctggaaggcgtttttcaggttccgtttgcgcaatctggcgctgagctgatgctgggtggcggtgcggcgccggcgggttagcacatcgctgcgccaggcgcagtccagccagcgggagagcggtcggcacagcagatcgctctgattaaatcccctcttccactgacgacgctgccagagcggcacgctaattatccggtccgggcggggaagatcccgacgctggcgaatgcgcaacagcagcagacgcgccagcgccggggccagctcgggccgcttattgaatttcagctggtgaatcaggccgctcagcggcggtcgatagtcattcaccgtcaccagccgctgccacggcggcggtttttgcaggcagcgcccgcagggcagcgtgcttgattgggccggcaggccgcactgcgggcacaacggttcagacgccagcagcgccgacgcgcatcgcgagcagatcccccagctggcgatggccagcggcatttggcatagccagcataagctgtgtgctgttagcatatttccccctcgtattggtggaaagagaacagtaactgatgaaaacgatcgcgtggcagaccacgggcgaaggaaattgtcatcttgtgctgctgcacggatgggggctgaatgccaaagtgtgggattgcatcacgccgcagctggcttcgcattttacgctgcacctcgtcgacctgcctggctatggccgcagcggcggctttggcgcgatgtcgctggaagagatggcccagcgggtgctggaaaacgcgccggagcgcgctatctggctaggctggagcctcggcgggctggtggccagccaggtcgcgttatcccatcccgatcgcgtgcaggcgctggtcaccgtggcctcttccccctgctttagcgctcacgacagctggcccgggattaagcccgacgtgctgagcggatttcagcagcagctgagcgaagattttcaacgcaccgtcgaacgctttctggcgctgcaaaccctgggtaccgaaagcgcgcggcaggatgcgagagcgctgaagagcacggtgctgtcgctaccgatgccgtcgccggacgttttaaacggcgggctggagatcctcaaaaccgccgatttacgccagccgttgaccgccctcgccatgccgtttttgcgtctgtacggtcggctggacggtctggtaccgcgtaaaatcattccgcttctcgatgcgctgtggcccaaaagcacgtcgattgtcttcgataaagccgcccatgcgccgttcatttcacatccgcaggcgttttgcgctccgctgatcgagctgaagcgtgagatcgataaatttttttagcgggacgtggtaaaaacgctgggtgcagcaatacttaggttgttgcgggggttgactatttcacgctggccccgtgacctaaaaaaaacaacctaatggagagtagaggctatgaaacttgttacaggaattgttgcatctctggtgattggctccctgtccttcggcgcgttcgccgccaaggaaattcaaaaagacgaagtggctaagttgaacctgaccaaaattggttcgattaccacctccagaacaacctctccgatggatgcaaagcgcgatctgtcgaaaaaagcggatgagctgggcggcacctattttgtggtgattgcaggcgagaagaacgagaaaacggttcacgctaacgcggacgtctacaagtaagccagaaagcgggtctcaggacccgcttgcggtatatgccgcagtcggttcccggaagcggcgcgttgcgcctgtccgggctacccaccccagaaccgtacaaatctgtggtcgaatctcccgggtcgcggcgtaaacgccttacccgggctaccaagcccaaaaccgcacaaattcgtagcccggataaggcgttagccgcaatccgggaaacctgccttcacagcccaatcagcgcagcgaccaccactcccgcaggcaggctttgccttccgggcagcttttacagctgccggagaggcagccatcggcatcttcggtcactttcaccgctttccccatcgcttgcaggcggcccaacatggcgtcaatcagcggctgcggcgtattcaggcggacgctgagctgctttgcctccatcctcccctgcagggccagcatatcgcggacttcaattaatgacgccatcatcgctccttagtggcaatcgcccgccggactctggcagcaggtggacggcgttttgcgcgtcgccagcagcgagacgtccacccggctacgcgctctgcgcagcaggccaaagatcacgatattgaacagcaccaccgccagaatgcacgccaggctatagcgcggatgctggctaaagctgacggtctggtagtacagcgtagaaagtgaataggcgatattcagcccccacaggacggagaacatcatccagccgcggctcgactcgcgggcaatcgcccccattaccgagatgcagggaatatagagcaggacaaaaatcaggtagctgtacgccgccgcggcgctaccgaatttgctgcccatgacgcccatcgcgccggttgccatttcgccgtcgcctttactggcttcgatagggttggccagcacgctcaggctgaacgtatctttcaggctctgccaggtctcgtctaccgcggccagcagctcatcgccgaggctaaacgtctgcggattaaacgcttcgttctggatatcttcagcggtgtagagggtgttcagcgtccccaccaccacttccttggccatcgcgccggtgaacagcccgacggtcgcctgccagttatcctcatgtacgccaatcggtttaaataccggggtgatcacccggctgaccgacgccagcgccgagtcgttgatgttatcgacgatcttaccgctcagcgagaagctgttcagcgcgctgaggaagatactgacgataacgatcactttacccgcgcgcaggacgaagcctttcagacgctgccaggtctggataatcagactcttcacgtgcggaacgtgatacaccggcagctccatcacgaacggcgacgcttcgccgcgcataatggtatgcttcagcatcagtccggtcgcaatcgccatcacgatccccagtacgtacagcgagaagaccgccagcgcgccgttctggccgaaaaaggcggcggcgaagacggcgaaaatcgccagccgcgcgccgcaggacataaacggcgccatcataatggtcatcaaacgttcgcgcggcgcatcaagcgtacgcgcgcccatcaccgacggaacgttacagccaaaaccgacgattaacggcacgaaggatttccccggtagccccagcgcctgcatcaggcggtccatcacaaacgccgcccgcgccatatagccagagtcttcaaggaaagagaggaacaggtacatcatgccgatctgcggtaccagcggcagtacggtattgataccgccgccaatcccctgggcgaggaacaccgtcagccagtccgggaaatgcagggtatagccaacccactgaataccgtggataaagatagccacggaaccggcatcaaaaatgggctgcagcgcgccgccgatattaatcgccagcaagaacatcaggtacataacgaacaggaagaccggcaggccgaggaagcggttgaggatcactttatccatcgccgcggtaaagcggcttggctcggcggtaagggtgttactgaccgcatcgcaaatggcggcaatactttggtaacgggcatcggcgatatgcagcgcggggtcatccatctcttcgctcaggtgcgccagggacacgtccagcttgtgggcagcgtcaccggcgtaggcgcggctgtaaatatcgccttcaagcatctgtaaacccagccagcgacgctggcgctgcggaatatccgcggccatggcctgcgccagcttgtccgcctcccgcagcagcggctgcggatagtgcaccagttcaatagcctggttctgctgatggcgatcgatcgccatttttaaggcctcgataccgcgcccgcgggtggaaaccagcgggatcaccgggcacccgagacgcgcggccagcgcgtcgacatcgatgcggatcttctgtttttccgcgatatcgagcatattcagcgcgaccacgcaggggatgccaagctccagcagctgcagcgtcagatagaggttacgttccagattggacgcatcgaccacgttaatcagcatgtcggcgtcgccgctgagaatatagtggcaggcaatctgctcatccagcgaggtttgcgaggagatggtggtcagggaatacgtgcccggaaggtctaccagcgtgacctgatgatcggtggtgttgaaaccaccctctttgcgttcaacggtcactcccgcccagttaccgacgcgctggcgcgcgccggtgagctggttgaacagcgtggttttaccggaattaggattaccaattaagccaagggttaattttttcatattcatactcttagtgccggtcaggcattattgtgcaaccgcttccagctcaattaacgcaagatcctttttacgtaataccaggctaacgcgtcgggtttcaatatgaatagggtcgccgagcggcgccacgcgaaccacattgaaagaagaacccggcagcatcccgagggacagcagcttttgccgatacgccggactaatatcgcgggagaaaccggtgattttccacgcactatcaggtgtgaattgcataggacctacttgtttatcgccaactgaaaagagagttttccgtatgcgccggagacgcggcgccagggaccgtagctaacgaagaagaaaaaatactcaatgcaaataatgataatgagaatagtttttatcatcaatacatataatgcggccgtttcgctttttaaagagaaaattgagcttttgttgatattgagcaaactctattttgtcgccgtcgcggaggtgatgattattcttaatgactaaatgtttaattaaagtttctatagttaacgaaatgaaaataataatatcgccgtccgtaattcgcgcttattacgacgttataagaaaatactgatgcttgtttgcacaatatggcgaatgccggaagaaatgcggccccttagcaaaaggggccggaaagaattaacgttttttacccattgccgccgccagcgcatccatcatcgcgctgttgcccgcaggctgcgcctcgcgaccgcgaggtttagcggccttcgccgccgggcggttgccctgaggacgatcgttaccgccgccgcggcgcgcgttgctgtcgcctggctgttcgtccagacgcatcgtcagcgcgatgcgcttacgcggcaggtcgacttccatcactttcaccttcacgatatcgcccgctttgaccaccgtgtgcgggtcttcaacgaacttattcgacagggaagagatatgcaccaggccgtcctgatgaacgccgatatcaacgaacgcgccgaagttggtgacgttggtcaccgcgccttcgaggatcattcccggcagcaggtcgttcatcgtctctacgccatcggcgaactgggcggttttaaactcagggcgcgggtcgcggcccggtttctccagctctttgatgatgtcggtcaccgtcggcacgccgaatttctcatcggtgaagtcagcggctttcagatgacgcagctcgctgctgttgcccatcaaatctttcagcgcctgctgagtcgccgccagaatgcgctccaccaccggatacgcttccgggtgcacggttgaggcgtccagcgggttgtcgccgtggttgatacgcaggaagcccgcgcactgttcaaaggccttcggccccagacggctgaccttcagcagctgctggcgattctggaactggccgttctcatcgcgccaggagacgatattctgcgccatcatgcgggtcagaccggcgacgcgggtaagcagcgggacggaagcggtattcagatcgacgccaacggcgtttacgcagtcttccaccaccgcgtccagcttacgcgccagctgggtctggctgacatcgtgctgatactggccgacgccaatggatttcggatcgattttcaccagctcggccagcgggtcctggagacgacgggcgatagagaccgcgccgcgcagggaaacgtcgagatccgggaactccagcgccgccagctcggaggcggagtacacggacgcgcccgcttcgctgacgatgaccttctgcgcggtcactttcgggaactgcttctgcacgtcgaggaagaagcgctcggtttcacgcgaggcggtaccgttgccaatcgccaccagctcaacgttgtacttttcacacagcgcggcaaccgccaccgccgcttttgcggcctggccggtatgcgggtagatggtatcggtagccaccagcttgccggtaccgtcaacgacggcgactttgacgccggtgcgcaggcccggatcgaggcccatggtggcgcgcagcccggccggcgcggccatcagcaggtcgtgcaggttgcgggcaaagacgttaatggcttcgtcttccgcgcgttcgcgcacggtccccatcagctcggtttcgaggtgcatcagcaccttgatacgccacgtccagctcaccacgcccttacgccagccgtccgccggcgcgttattcaggcgcaggccgagatggtcgataatgatttgctcgccgtggctctctttcggcggctcgtcgaactgcgggtcggcatttaaagagagctgcagcacgccttcgttgcggccgcggaacatcgccagcgcgcggtgcgacggcacggtggcgatcggttcgtgatggtcgaagtagtcgcggaatttcgccccttcctcttccttaccgctgacgacggtcgccaccaggtgggcgtttttccacagatagtcgcgcacttttgccagcagggcggcgtcttccgcaaagcgctccatcaggatatagcgcgcgccgtcgagagcggcttttgtgtccgctacgccgttgtcggcgtcgatatatttagcggcttcggtttccgggtcgtgagagggttcgttccacagcagatcggccagcggttccagcccggcctcaatggcgatctgcccgcgcgtgcggcgcttcggcttgtacggcagatagagatcttcgagctcggttttactcaacgtcccgttgatggctttttccagcgcctcggtcagcttgccctgctcgccgatggacttcaggatcgcctgacgacggtcttcaagttcacgcagatagcccaggcgggtttccagattacgcagctgcgtgtcatccagaccgccggtgacttctttacgatagcgtgcgataaacggcacggtattcccttcatcaagcaggcgaacggcagcttctacctgttcagccctggcctgaagttcacccgcaataatgcggcagagcgaatcattcatcatcggtttaattcatctttaggatcaaaaatcagggggatagttatacggactggcacgctaaaatgccagccgcgacccaagcctctcggaatgttccggacctatttggctttgacgtattcaatttcgttcacgtaccaggccgcctcgcccgcgggggtgttcacgatagctaaatcaccgacctcttttttcagcagcgcgcgcgccattggcgaatcaatggagatgtagtcgttgcggccaaagatttcatcgtagccgacaatccggaagcgcttcgtctcgcccgcatcgttttcaatctccacccacgcgccgaaaaagaccttaccctcctgctgcggcgaataatcgacgattttcagctgctcaaggcacttggtcaggtagcgcacccggcggtcgatttcacgcaggcgctttttattgtattggtaatcggcgttttcactgcggtcgccgaggctcgccgcccaggtcacctttttggtgacttccggacgttcttcgcgccacagggtatccatctctttcttcagtttttcatacccttcacgggtgatcagcggcgttttcatcgaaggttccggctcctgattacagatctttgtgcaatgctgcgcacaattcgtcgcacgtcatcataccaacaggataaataatgtgtcttatgcttaaatgtatacttaagctgctgttaaatatgctttgtaacaatttagcctggaatatataccagatttcgctggtgggcgacccgggcttttttgagaatacgtactgacaattgcagtgaacctttgggagtataaacaatgcaagagaattataagattctggttgtcgatgacgacatgcgcctgcgtgcgctactcgaacgttatctgaccgagcagggcttccaggttcgtagcgtggcgaacgctgaacagatggatcgcctgctgacccgtgaatccttccacctgatggtgctggatctgatgctgccgggcgaagatggcctgtccatttgccgccgcctgcgcagccagagcaacccgatgccgatcattatggtcacggcgaaaggggaagaagttgaccgtatcgtgggcctggaaatcggcgccgacgactacatcccaaaaccgttcaacccgcgcgagctgctggcccgtatccgcgccgtactgcgccgtcaggctaacgaactgccgggcgcgccttcgcaggaagaagcggttatcgcctttggtaagttcaagctgaacctcggcacccgcgagatgttccgcgaagatgagcctatgccgctgaccagcggtgaattcgcggtactgaaagcgctggtgagccatccgcgcgaaccattatcccgcgataagctgatgaacctcgctcgcggccgtgaatattcggccatggagcgctccatcgacgtacaaatctcccgcctgcgccgcatggtggaagaagatccggcacatccgcgctatatccagaccgtttggggcctgggctacgttttcgtcccggacggctctaaggcatgaaacgcgtgcgcttttcgccgcgaagctcgtttgcccgcaccctgttactgatcgtcaccctgctgttcgccagcctggtgacgacctatttagtggtgctgaatttcgcgatcctgcccagtctccagcagtttaataaggttctggcctacgaagtgcgtatgctgatgaccgataaactccagctagaagacggcactcagctggtggtgccgccggcgtttcgccgcgagatttaccgcgagctgggcatttcgctctattccaacgaagcggcggaagacgcaggcctgcgctgggcgcagcattatgaattcttaagtcagcagatggcgcaccagctcggcgggccaaccgaagtgcgggtcgaggtaaacaaaagctcccccgtggtgtggctgaaaacctggctttctcccaatatctgggtgcgcgtaccgctgaccgaaatccaccagggcgatttctcgccgctgttccgctacaccctggcgatcatgctgctggcgattggcggcgcctggctctttattcgtattcagaaccgaccgctggtcgacctggagcacgcggcgcttcaggtcgggcgagggattattcccccgccgctgcgcgaatacggcgcatcggaagtgcgatcggtgacccgcgcctttaaccacatggcggctggcgtgaagcagctggcggatgaccgcacgctgctgatggccggggtgagccatgatttacgcactccccttacgcgtatccgcctggcgacggagatgatgggcgaagaggacggctacctcgccgagtcgattaataaagatattgaagagtgtaacgccattatcgagcagtttatcgactacctgcgcaccggccaggagatgccgatggagctgacggaccttaacgcggtgctgggggaagtgattgcggcggagagcggctacgagcgagaaatcgccaccgacctgcagccgggcgagatcccgctgcgcgtgcatccgctctccatcaagcgcgcgctggcgaatatggtggtcaacgccgcccgctacggcaacgggtggattaaagtcagcagcggcagcgaggggaaccgggcctggttccaggtggaagatgacggtccgggaattaaaccggagcagcgtgagcatttgttccagccgttcgtgcgcggcgatagcgcccgtacgattagcgggaccggcctcggcctggctatcgttcagcgcattatcgataaccataacggtaagctggaacttggctccagcgaacgcggcggattattaattcgcgcctggctgccggtgccgatgcagcgtgccctgcccgcgataaagcccgccaaagagatctaattctgccggtacgcccgcattaaaacgcccggcggcgccacgctgtacgccgccgcattgcccttgtatcccggagaggtgcgccagcaccgcctccggactgcaccaggtttaatgcgctttattcgccatcgcatacgccgctggcaaattcagccgctgccagaactgctgcgcgtcgttatcaccggaaagcggataccctgcgggcaacgccgttttgaccatcagcgcccgacgctgcgcggcggacagattcggcagcgcagcctccagcagcacttcagccccttgcggcaccttcaggctctgtttttcgcccttctgctgcggcagatcgtaggtcatggtaaagcgataaaacgcgaccatcgccgggtcgcgatacggatcgtctttcgcaggcactttcgcgcactccgccagcgtcgtgccgcactctttctccagcgcggtacgcagctggtcgcgggcctcattaaacagcccgcgatacttcgcgtcattcaggtagtgggcgacattgcgctgcgccaccatccgcgaccccatcacgtccagcggatagtgcacgcccagcacgatgcgcgaatagccatagcgtgcgccgcgcgtcaccagcgcgtcgaagcgctccgggatcatctccgccattagcagagcgtcggtatagccggtgttggtgtgcccgctcggaaacgagccgccgtcggcggtatagggcttattgtccttaacgaccacatcgtccggcaccagatggatggtattgccctgaatcaggaacgggcgcgggttgttaaagtgctttttcgccgccccggtactcacttccgaagctttgatcagcgccgccgccttaccaagctcgcctttgtcgtaggcggcgaggaacgctttgccgagacgcggccccagcgcatcgctgaggaagtagagatagctgatgccctcggcatccgccagcgcctgatggcgggaggtctgtacggcatcgcggttgatggcggtgaccgtcgccagattttgctcaattaccgccttcggcagcgcagtgaacgccgagagcagcgcaatacccgcctgctggttggcttttgtctggaagtcataaccgctggccttcagccacgcggtatccgcctgagttttattctgtctggcgtgttcaagctggtcgcgagtcagggttgccgcatcgcccttcagcgcgttgcgcagctgcgacaggctttggctctccagagcgtcaaacgccggactggcggcggctggcgtcacgccgttggcgattgccgccgcctgattcaaaggaacctctttcgccaatgccggcagcgccagcacgagcgccgatgcgagaagcgtgatgtgcagtttcattattttccttttataccctaaataattcgagttgcttaaaggcggcaagggagtgagtccccgggagcatagataactatgtgaccggggtgagcgaacgtagccaacacataagcagcttgaagtatgacgggtaaattcaaaccattaccttgcctttacgtgacgctagcccttctgtttgacgcttttatgacacggttatgttttgcaacgctttaagcggaatggaaacagcgcggcggtaatccaggccgatctgcggtaaactatcggtcatcttgtctcaatcccggaatcaccgtatccatgctcagttatcgtcatagctttcacgcaggcaaccacgccgacgttcttaaacacaccgttcagagcctgatcattgaatcgctcaaagagaaagaaaaaccgtttctctatctggacacccacgccggcgcaggccgctatcagctgagcagcgaacacgccgagcgtaccggtgaatatctcgaaggcatcgcccgcatctggcagcaggatgacctgcccgccgagctggagccgtatatctccgtcgttcagcacttcaaccgtagcggccagctgcgctactaccccggctcgccgctgattgcccgccagctgctgcgcgagcaggacagcctgcagatgaccgaactgcatcccagcgattttccgctgctgcgcgccgaatttcagaaagacgaccgcgcccgggttgaaaaaaccgatggctatcagcagctgaagtcgaagctgccgccggtttctcgtcgtggactggtgctgatcgacccgccttacgaaatcaaaagcgactaccaggcggtcgtgaccggtattcatgaaggctacaaacgctttgctaccggcacctacgcgctgtggtatccggtggtgctacgggcgcagattaagcgcatgatcaaagagttagaggccaccggcattcgcaaaattctgcaaatcgagctggcggtgcgtccggacagcgaccagcgcgggatgaccgcctccgggatgatcgtcatcaacccgccgtggaagctggagcagcagatgaacaacgttctgccgtggctgcataaaaagctggtgccgaccggcatcggccataccaccgtcagctggatcgtgcctgagtaatcgcagtcatcggtggaaactattgatttcaggtatacaatcgcgccaatcagacattaaggataagactcatgagcaagcattatgactatatcgccattggcggcggcagcggcggtatcgcctccattaaccgtgccgctatgtacggccagaagtgcgcgctgattgaagccaaagacctgggcggtacctgcgtgaacgtcggctgcgtgccgaaaaaagtcatgtggcatgcggcgcagatccgtgaagccatccatctgtatggtccggattacggttttgataccactatcaatcacttcgactgggacaaactgatcgccagccgtagcgcctatatcgatcgtatccacacctcctacgataacgtgctgggcaaaaataaggtcgatgtgattaaaggcttcgcccgttttgtcgatgcgaaaaccatcgaagttaatggcgagacgataaccgccgatcatattctgatcgccaccggcggccgcccgagccatccgaatatccccggcgtcgaatacggcattgattccgatggtttcttcgaactgccggcgctgccgaaacgcgttgcggttgtcggcgcgggctatatcgccgttgagctggcgggcgtgattaacggcttgggcgcggagacgcacctgttcgtgcgtaaacacgcgccgctgcgtagcttcgatccgctgatcgtggaaacgctggttgaggtgatgaacgccgaaggcccgcagctgcatacccatgccattccgaaagcggttgtgaagaacgccgacggcagcctgaccctggaactggaagatggccgcagccagaccgtggactgcctgatttgggcgatcggtcgcgaaccggcaaccgataacttcaacctcgccgcgaccggagtggaaaccaacgataaaggctatatcgtcgtcgataaattccagaacaccaacgttccgggtatttacgccgtcggcgataataccggcgccgtcgagctgaccccggtcgccgttgccgcaggtcgtcgtctctccgagcgtctgtttaacaacaagccggacgaacatctggactacagcaatattccgaccgtggtgttcagccatccgcctatcggcaccgtcggcttaaccgagccgcaggcgcgcgagcagtacggcgatgaagcggtgaaagtgtataaatcctctttcaccgccatgtataccgccgtgacctcacaccgccagccgtgccgcatgaagctggtctgcgtcggcccggaagagaagattgtcggtattcacggtatcggcttcgggatggacgagatgctgcagggcttcgcggtggcgctgaagatgggcgcaaccaagaaaggcttcgacaataccgtggcgatccacccaaccgccgcggaagagtttgtgacgatgcggtaagacgcgcaccatgcctgaaaaagaagctccggagagcttcttttttttgcctctacgccacgccgttattcccgtgacgcttaaacgccggccgctgattcagcgccatataccagcgctccacttccgccatttcaggatgggcgaacggcgtcattttccagcgatgcaccgacaggccaaggacaatatccgccagcgtaaactcgctaccggcgacccatgccccggtttgctgcagctgcgtattgacgatctgcacgcagcgggtccaggcggcaatgctctctttgatagccgtcggatcctgaaagcgcgggtccttgcgtaccagtcccataaaggcatagcgccaggcagtattaaattccgttgcctgccagtccatccagtgctcaacctcggcggcagcctgcggcgccgtggggagcaggtcttcccgcccggctttgcgcgccagatagcggcagatgctgttcgactcccataacacaaagtcgtcatcccgcagcacgggcaccaggctgttcggattaagggcgcgaaactccggggtctcaatcgactgaaacccgctgccgtaatcctcctgctgatattcaagccccgcctcttcgcaggtccacagcactttgcgcacgttaattgatgagcgtttgcccagtatttttagcattgtcagcaattcctcaatcaaaagagatgtttgtttcacaatactgcatcggcggcgcatgtacagccggataatgtgtatagtggattgcacgatttttctccaggacaggttacccgacatgttgacctcttttaacgttttaacaccgggcaatatccgctttggacgcggccttgctctcagcgccgccccctggctcgccgcccgctccgcacagatactgctgattcacggcgccagcctgcagcgcgcggcgttcttattaagcgaactccacgctcaccagctgaacgtcaccacgctgtctatcgcccatgaacccgacctgcaggatattgaacggggcgttcgtctggcgcgggaaagaggcgtcggcgcggtggtcagcctcggcggcggcgcggtgatagatgccggcaaagcgattgcggcgctggttcccgcgcaggggcccgcgatcgagtatctggaagtggtgggtaccgggcgcctgttagaagccaatccgctgccgttcgtcgccatccccaccacggccggtaccggagcggaagtcacaaagaacgcggtgatcaacgtccccgagcagcagcgcaaggtcagcctgcgcgacgaccgtatgctgccggacctggcgattgtcgacccgtcgctcaccgacaacaccccgcgcgcggtgaccctcgcttccggcctggatgccctcacccaggtgattgagccctggctgtgcgcccgggcgaatccttttaccgacgctctctgccgggaggcgatcccacgcggcatcaaagcgctcagaacgctgatggccaaagagtgtccggatagccgcgatgagatggcatgggtcagcctgtgcggcgggctggcgttagccaacgccggtctcggcgtcattcacggtcttgcgggcccattaggcggtctgagcaacgccccccacggcgcgctttgcggcagcctgcttcccttcggcctggcgctcaatgaaacgcaaattagcgacgaacgcctccgccagcgttttgccgacgtacgccagtggctggccgccgggctggacgccgatccaaacagcgcctgggagagcctgcgcgagtggagccagcgatccggtctgggcaatctgtgcgagctcggcgtcccccgcgaagcgctggaacccgcggccctcgccgccagcagctcatcctccatgaaggctaacccggttatgctgaccagcgagcagctgctggaaatgctggaggccgcgtgggagtaatggcttaatcgctaaagcgcctggaaatttagattttgttgcaaaacgaaatctccgaatttttcggcgcaatacgaagcggttaaaacggttttaatgctccaggtcaacgagttaaagcagaaaccccgggcagacggtttagaacaaagcgtgatctaccgcacacttctcttttcgtttcccgctgcgaatgtctaagcttaatagacaggtcgggcgcgcccggcatcctctactgacgcaatccggaggtccgtaccactatgttcagccagaaattacgcaacgttgatgacgatgagctcaggatcgaaatcgatccgtgctacgaagccgatccgtatgagttaaagctggatgaaatgttcgacgccgaacccgaaccggagatcatcgaagggctgcccgcctcggatgccctgacccctgccgatcgctatctggaactgttcgctcacgtccagaagtcgcgaattttcgccgatagcaaaaccttccccgactgcgcgccgaagcaggacccgctggatattttgattcactaccgtcgcgtccggcgcacccccggattcgatctccgtcagtttgttgaagaccacttctggctgccggaaaaccgcgccgaggattacgtctccgatcccacgcgatcgttaaaggagcatattgataatctgtggcccgtcctgacccgcgagccgcaggatcatattccctggtcgtcgctgctggcgctgccgcagtcttatattgtgcctggcgggcggtttagcgaaacctactactgggattcctacttcaccatgctggggctggcggaaagcggccgcgaagacctgctgaaatgcatggccgacaacttcgcgtggatgattgaaatctacggccatattcctaacggcaaccgcacctactatctcagccgctcgcagccgccggtgtttgccctgatggtcgaactgtttgaagaggatggggttcgcggcgccaaacgataccttgaccatctgcggatggagtacagcttctggatggacggcgcggaatcgctgatccccaaccaggcctaccgtcacgtggtgcggatgccggacggctcgctgctgaaccgctactgggacgatcgcgatacgccgcgcgatgagtcatggcgggaagatgtcgaaacggcgaagcactccgggcgcccgccgaacgaggtctatcgcgacctgcgcgccggggcggagtccggctgggattactccagccgctggctgcgggatatcacccggctggcgagcatccgtaccacccagtttatccccattgatttgaacgccttcctgttcaagctggagaacaccatcgccaacctctccggcctgaagggcgaccgggaaacagaggccgcttttcgccagaaggccagcgagcgcagggcggcggtaacccgctatctgtgggatgacgaaagcggctgtttccgcgattacgactggcgccgcgagcagctggcgctgttttccgccgccagcctcgtcgcgctgtatgtcggcatggcgacccatgaacaggccgacaggctcgccgacgcggtacgcgcccgcctgctcacccccggcggtattatggcgacggaatatcaaagcggtgagcagtgggataagcccaacggctgggcgccgctgcagtggatggcggtacagggttttaaaatgtacggccaggatcccctgggcgatgagatagcccaaagctggctgcaaacggtgaatcatttctataaacagcactataagctgattgaaaagtaccatatcgccagcgccaccccccatgaaggcggaggcggtgaatatccgctccaggatggctttggctggacgaatggcgtggtgcgccggcttatcggcctgtacggcgaaccgttgtaaaagcggactattcccgcggtcgatgtcctgctatgttcatggcatcgactttcgccggaagcccagctatgcctgaactggttaccccacgtctgcgctgctcgccgctgcagcttgacgactggcccttttttctcagcttacagcaagacccccaggtgatgctttacgtcgcggatccccgcccggtagcggacattcgcgacgcttttgatgcccggcttcccgcgtggtcgccgggcgctgcccactggctgtgcctggtagtgcgcgaccgctacacccacgctcccctgggcctcaccggctatcagcatcacgctcccgatagcgctgaagcgggttttctgttcgctccccgggcgcagggcaaaggttacggctatgagtctctgcgcgcgctgtgcgattacgctttctccgccggcggcatccggcggctgacggcaaccgtcaccgcgggcaatctggcgtcaaaaaatctgctgcaaaaggtcggttttcaccaggagggcgagctgcgcgactgctactggctcaacggtcgctggcacaacgattggctgtttggactgctgcgccgcgattaccaccagcctgggccatctggcgaatagggcgcgacgcgcttttcctctacactgcaggccgacaacagaggaagcgataaatgtccccaaccataccgccgctaagcctgcacgggctggagtttattaagcgaatgcaggggttagcgctcgccccctatcgggacgaaagcggcctgcgcgtgattggctacggccacgttctcaatgattacgaatcgttccctcacttcacgcgcgagatcgcggagactctgcttatcgtcgatcttctgcagtgccagcgcgaacttaagcgcaggctccgggtcacgcttaatcaagcgcaatatgatgcgctggtctcgttagcctttagctgcggggcggcgtctccggcgcttgataccgtcctgacccatcttaaccatcagcggttcgctgatgcgctgagcgcatgggaaaatattcgcatcggccgcgaacagcggcgcgaagagtgcgcaagattcaaaaacagagccgattaagtttcgctgacgcgatgaaaaaccatcgccgcctgggtacgattcttcacgtccagccgacggtacagcgactcaagatgggcctttaccgtgccggtgctgatatttaacgtccggctaatctgtttattagagtcaccggcggccagcagctgcaaaatctcacgctggcgctggctcaaatgaacccgtttattatcgctcacctccgccattattaatccatcgtccggcaagcagggcagcccccgccggagacgattgatggtctgagcgaaagtgggcaaactttcctcgcgctgcacgatggcccgcacattataagacagcgcgcgctgtagccagcccttattatcgtcagaaacgatcagcaggacctgagcgtgcggaaagcgacgctgtttttcctccagcagccaacagcaaaactcaccgtgcatatccccgtccagcatgagcagcgcgtcaggatgcgccgtcagcttctgccagagctgttcagcctgacaggtgccaaaaatatcaatctctggaatgtattgctggaggccaattttcattccatgaataaatatcgactgcctgtcaaacatgagtacctgcatgggtttcgctccaataaataaatgcccgacgaaagggcaacatcagccaaaataaataacaacgcgccgtttggcctggggcattttaccgataggggagatgaacgaaatatcataacaatgaatagttacagggcttattggccccattacttgtccacaatatttattacatttgaattaaggaaatccttaattatgcgggcaaggaaaaataaaataatactaattttctagtttaaacgaagccggaaacgcaggcgatggcgaaatgaggaaagtctgttacgaaataagaaagcgcatgaaatacgttagcccctccatactctatggaggggcgcgggattacaagaacatcccaccggagacttctacgcgctgggcgttcatccagcgcagatcatcgctaagcagcgcggcgatggcatcgccaatatcatccggcagccccactcttccgagcgccgtttgcgcggcaatatgctgattcacctgcgcgttatccctgaccacaccgccgccaaaatcggtttcaatcgcgccgggcgcaataatattgaccgaaattccgcgttctcccagctccttcgcctggtagcgcgtcagcacctccatcgcgcctttcattgaggcgtaggccgcatagcccggcagcgcgaaacgcgccagtccgctggaaacgttgaggatccgccccccgtactgcaataacggcagcaggcgttgggtaaggaaaaacggccccttaaactggatgttcattaattcatcaaactgcgcctcgctggtttcagcaaagggaatattcaggccaattccggcattgttcaataaatagtcgaaggtctcccgctgccaacgctgctgaagcacttctcttaccttctgagcaaaactgtcgaaactgccaacatcaccgacgtttagcggtaatgccgcggctttcacgcctttttgctcaatttcagccaccacgtccagcgccgcctgcgggttactgtgccaggtcagaataatatcggttccctttgccgccagcttcaatgcggcgttttttcccagtccacggctaccgccggtgactaaagcgatacgttgcgtcatcagaaaaccccttcttggttgcgtttgcatcgttgaagagcttattagctgctataaaaacaataaatatggcaaattacgttttactgtttcattaaaaacaacaataggccgccggcatggataaaattcacgcaatgcagctgttcatcagagtcgcggagctggaaagtttttcccgcgccgccgatacccttggcctgccgaaaggaagcgtctcgcgccaaattcaggcgctggagagccaccttggggttcgtctgctgcatcgcacaacccgccgggtacagctgacgcaggacggtatggtttattacgaacgcgccagagacctgctcagcaatcttgaagagctggacggcatgtttcagcttgacccctccagcatcagcgggcgtctgcgggttgatatgcccgtcgccgtagcgaaaaagctggtcattccacagctgccggcatttctgcagcagtatcccggcatcgaactggagctcagcagcagcgatcggttagtcgacgtggttcgcgagggctttgactgcgtggtgcgcgtcggtacgctgaaagattccgggctcatcgcgcggccgctgggcaagctaacgcaaatcaactgcgccagcccgcagtacctgacgcgcttcggctatccgcaatcgctggacgatctcgccgatcatgcgctgatccactacgcaagcagcctcggggtgcgcccgctgggcttcgaagtggtcagcgagggcgccgtccgctggatcaaaaccggcggcgtcttgacggtgaacagcaccgagacctatcaggcgtcgtgcctggcggggctgggcattattcaggtgccgcgggtgggggttcgggaatggctgcgcaccggcgagctgatagaaattctgccccactaccgcgccgagccgctgccggtgtcgctcatttatccgcaccggcgtaatctctcgcgccgggtacatctgtttatggagtggctgggcggcttaatgaaaaactacgttgattaggccgaataatgaaaaatctgtatttgagagcgtgccgatattccctgccgggtgctggctgacgctttgcatggcgtaaaaaccaacaatatcatgccattatcaaattctcccagaccgatacaaacgcagcgcagccggggaataacacaagaaagcgcttcagtgattcgcagattccgacgtccgatacccccgatacgccccatccgtgattttacgtatataatttttgaagaatatcgctgtaaaaaaggaagaaataatttatgacgccggaaaacgacgctcaacgcccaaccgaggatccgggccagcagccggataaaaacaaaagcgcgatggctgcgataaacgactctaccgtggcgaaaaaagccaaccaggcgctgaaaagcgtcaccggaacggcggaaaaagttcagcgtaaccatatggtcgcccatatcatccgcgccgcggagcgctttaacgacaggctgggtaatcagtttggcgcggcaatcacctacttctcgtttttatcgatgatcccaattctgatggtctcttttgcggccgccggttttgttctcgcctcgcatcccacgctgctacaggacatcttcgataaaatcctgcttaacgttagcgacccgacgctggcggcaacgctgaaaaataccatcaataccgccgtacagcagcgtaccgccgtcggtattgtgggtctgctggtggcgctctactccggcattaactggatgggcaacctgcgtgaggccattcgcgcccagtcgcgcgacgtctgggaacgcacgccgcaggatcaggagaaaatttgggttaagtatttccgcgactttatctcgctgatcggcctgctggttgcgctggtcattaccttgtcgatcacctctatcgccggctcggcccagcagatgattatctcggcgctttatcttgattatatcgagtggctgaaaccggcgtggcggctgattggcctcgcgatttccatcttcgccaactatctgctgtttttctggattttctggcgactcccgcgccaccgccctcgccgtaaggcgctgattcgcggcaccctgattgcggccgtcggctttgagataatcaaaatcattatgacctggacgctaccggcgctggtgaaatccccatccggggcggcattcggttcggtgttggggataatggccttcttctattttttcgcccgcctgacgctgttctgcgccgcatggattgccaccgccgaatataaagacgaccgccggatgccgggcaaagcccacgactaaaccatcactgggctgaataaaagacgcaaaattcagcccaacctggcatttcagcatataaatccaacatgtaacttttatttaacctaaacctggttttatcgaccattatttgaattttgtgaagcatttcatagaagttatttttctggcacagaaattattcactttttgcttcttttttcgcctctctcgccccttgttacagattgaaatgtccccaaggctgtggctatatggcctttcgttcgcaaaaaataagaaagatctatgcaagccacagccacaacactcgacaacgcgcaggacaccgttccggttaactcacgcaataaagtcgtcgtcgcctcactcattggtaccgccatcgagttcttcgacttctacatctatgccaccgcggcggttatcgtattcccgcacattttcttcccgcagggcgatcccgccgccgcgacgctacaatcgctggcgaccttcgctatcgcctttattgcgcgccctatcggttcagcggtctttggccacttcggcgaccgcgtaggccgtaaagcgaccctcgtcgcctcgctgctgacgatggggatctccaccgtggttatcggcctgctgcccggctatgaaaccattggcattatggcaccggtgctgctggcgctggcgcgctttggtcaggggctcggccttggcggcgaatggggcggcgcggcgctgctggcaacggaaaacgccccgccgcgcaagcgcgcgctgtatggctcatttccgcagctgggcgcgcctatcggcttcttcttcgcaaacggcaccttcctgctgctctcctggctgctgaccgaccagcagtttatggaatggggctggcgtatgccgtttatcttctccgccgtgctggtcattatcggcctgtacgtccgcgtttcgctgcacgagtcgccggtgttcgctaaggtagccgccgcgaaaaaacaggtcaaaatcccgctgggcacgctgctgaccaaacacgtgcgcgtcaccgttctcggcacctttatcatgctggcgacctatacgctgttttacatcatgaccgtctactccatgaccttcagcaccgccgccgcgccgattggcctcggcttgccgcgtaacgaagtgctgtggatgctgatgatggcggttatcggttttggcgtgatggtaccggtggcgggcctgctggcggatgcattcggccgtcgtaagagcatggtcgtgattacgaccctgatcatcctcttcgcgctgtttgcctttaaaccgctgctcggctccggcaacccgctgctggtctttgccttcctgctgattggcctgagcctgatggggctgacctttggccccatgggcgcgctgctgccggagctgttcccgacggaagttcgctataccggcgcatcgttctcctataacgtctcgtcgatcctcggggcgtccgtggcgccgtacatcgccgcctggctgcagggcaactacggtctgcctgcggtagggctctatctggccgccatggcggcgctgacgatgatcgcgctgctgctgactcacgaaacgcgtcaccaatcgctgtaactctccctccacgcccctggccatccggcgaggggcgtctccttgccgactattttttcatctgcgacagaattgcccgacactggttcgcctcgccttcggcgggtgagatcagcgccagcagcgcggcggccggcgtcaccagggtcgccagcgctgccgctaccgcgccgcgggcaatcagcggccccgccttcacgcccgcattcggcgacttaaaggtgccgcgcacgtagagcggtgaacgcagggtgataatgcgaaagcccttactctccggatcgatagtgaggtccagctgctctgaggcaaagctggcggtaccggtgacgttgatcagcgcgttttccgtatcaaaggcaaacacctgcggccgggcgacgccgttgaccacgtcgatattggccgccgcgcagttcacccgcacctcatcatcgccaaagatctgcccgatgataaagttaccgacgttcaggccgaggatctccatcaggttgcggctaattaaaccgtcgttcatcagcagcttcaggttaccgttactgttgcccagcagcgcggcgacggagttgccggtgccgcgaagctgcacatcgccgttcatttcgccgagggttttctgcatcatctccacgtttggcatcagcgctttcagcttcaggcggcgcgcctgcaggttcgccgtcccctgcagcggttttttatccccttcaagatgaatgctgccggcaatcgtgccgttggccagccccagacgcagcggctgcaggcgcaggtcgccccgttcgaggatcacgtgggtggagaggtcgctgatggggagcgtgccgccgtgctcaatgcgccgtcctttaaagcgcacatcggcatccatcacctgccacttatcggtttcaaagcggtcatatggcaacacttttccggccggctgcggggaggcctcgcctttgcgccgttcggtctggctgcctttaccgccggagtcgacgccaatcagcggccccagatccgccagccttaactgtctggattcaaggtcgccctccagcttaggccgggtttaccggtggtgtaagtcagcgagccgtggatatcgctctcgccgatgcggccattaaaatcctgataggcgaagcgtgaaccgtttttctccttgaaggtggcccgcagatgcccgtcggtcgaaaaggccggcgtatccggcagcagcacgccggtcaggtcatagagatcgcccagcgagtccccggaaaacttcagccgcagatcgacgccgccgaggttaagcggatcgctgaccgtgccggtaaacgcgacccgggtattgccggaacgaaaatccccctgcagggggaacggcgtcccttcgctgcgcagcgccagcatgccgccgattttgccgctaccggagagcggctgtccgttatagctccctttcgcctgcaggccgaagacgtaatcgcccactttctgcggctgccctttccccttctcgccggtcacttcactgaacgccagcggcttaccgagcggatcaaccacgatcgtcacgtcagcgcgcgacactttgtcatcaacggcaatcttgccgcgatcgaaaagaatattgtcgaggcggaaagaccagctggaaggcgccgcatctttctccgacgaccccgccgaagccaggtcgaaagtccagttgttgctcttctccgacagtcggatcagccgcgcgtcgggctgttcaagcttaatccacggcagatagaccgttttgctgagcagcgccagcggggcgagagtcgcctcaacgcgcggcaggtggaccatcgtgacctgcgggatatcaggggggttgccaaggacgatatcttcggcatgaacgtgcggccaggggatccagcttcgccagccgctctcgccgggctggcgttcccagacgacgcccagatcgccgcgaatcgcgaacgggcggttcagctcggcagagactttctggttgatcgtcggcttcaggcggttccagtcaaaggtcgccagcacgataaaaaacagaacgatcagtacgacaatcgttcccaggataatagccacggtttttcgggttctgctcatcccttctgcactccttttgcgtctcgtcactcctgaatatagttgagaaacgccatttgctccgccgaatgaggttttcgtcacataatccgcgtcaggtcaaaaaaataatggaacgttgttttaatatcattgaccatcaaagcgccccagcgcacactagggttaatattgatttaatttcaggtcatcactatgtcgaagaaaattgccgtcattggcgaatgcatgattgagctgtcagagaaaggcgcagcggttaatcgcggctttggcggcgacaccttaaacacttccgtctacatcgctcgccagaccgacgccagcgcgctgggcgtgcactacgttaccgccctgggcacggacaccttcagccagcagatgctcgaatcctggcagagcgagaacgttcagactgacctgattcagcgcatggccgaccgtttaccgggcctctactacatcgaaaccgacgagagcggcgagcgcaccttttactactggcgcaacgaagccgcggcgaagttctggctggagagcgagcagtctgcgaccatctgcgaagagctggcgacctttgattatctgtatcttagcgggatcagcctggcgatcctcagcccgaccagccgcgagaagctgctgaccctgctgcgggaatgccgggcgaacggcggcaaggttatctttgataataactatcgtccgcgcctgtggagcagcaaagaggagacgcagcgggtttatcagcagatgctggcctgcaccgacatcgcgttcctgaccctcgatgacgaagacgcgctgtggggcgagaagccggttgcggaagtgattgcccgcacccacgccgccggcgttgaagaagtggtggttaagcgcggcgcagactcctgcctggtggcgattgccggccagccgctgcgggaagtcccggccgttaagctgccgaaagagaaagtggttgataccacggcggcgggcgattcgttcagcgccggctacctggccgtacgcctgaccggcggcgacgccgaatctgcggcaaaacgcggacacctgaccgccagcacggtgatccagtatcgcggcgcgattatcccgcgcgaggcgatgccgcagtaattttcgattgcgttacgcccgcctgcgagaatcccggctggcgctgcgcgtagccgggctactgtctggcactggcattagaccggacaaggcgcgccagcgccgcctccgggaaaatcaccgggccaacccagcaatacgtaaaacagattagccataaacctcaccggatagccacgctatccggttttgctttactgcgctggcgggatatccgtcgcttcgttacgcccttccacaacatcaccggcggcgctcgacgccgctgcggccgctggcgcgggcgccatcagcttttcccacgtcgcctgcagttccttcatgttgtattccggctcaccctgcggctgctgcagcaccagcgccatatcctgcgacagctgctgacgcaggtactgattcagcatgtcgaccgtcagcgaattgagaaactcctggcgcagtttctgatactgctcgggcgcgatatccaccacctgattttgcaacgaacgcatccgctggctaatcaggatgtacgtatcggtgcgcgcataggtggcaaacagcttctgcagttcgaggtttttctgcgcgatcagggcatcaaactcctcctgcggcaggccgcgatcgcggactttcgccagctcgcgcgccacggtcgttaagttggcgttcaggcgctcgcccggcgattcgatattgatcgcgcactgggcgcgctggtagagcacgcggcagtcaaagccaaggccgatatccttgatattacttttgctcagattctgctgtacgtgccagaacagcgcttcccgggcaagatcgtcgcgccagtagcgctgcagcgcgaccgagtcgcggatcggctgccacggcgcatcccacatcagcgacagcttatcctggcgcaccgcatcggtcatgatgctgaccggcgtcgtcggcagcggcgacagcgtaggaaccgccaccggcgtttcgcgcttgcccttcaggccgccgaaagttttgttgatttgttccgcgacgctgcggctatccacgttgccgaccacaatcagggtcatggcatccggcgtgtaccacttgtggtaatactcttttagctgagcaatatccaccggctgcttcagcggcgccgccggatcgtgccccagcatggtggagccttttagccgatagcgccaccagccttctttggtatccgcaggccaggttgccaccatgtcttcgccctgcagcgcgtggttgacggtttccggggagatcggcattttaccgctggcgctggccagccagctcagcgcctctttcagcaggtcgttacggttattcggtatgctcaggttaaacaaactgtagtcataagagacgatggcgggcggcagaggacgcttcgggtcaatactctgctgccatagcgaacgggcctgcatggtcgggaggccaccgttttgcgtcagcgcgaggcgcgggataaagtggctaaagccgctctgctgagtgctttcgctcagcgagccaatattcacggacaggcgaacttcgatacgatcgctgggacgctgcggggtggctaaaacctgccactgaaacccattcgccagtgtcccctgttgccaggccgggtccggctggagcgcttctgcctgcacataaccgaccgtcgccatcatcagcaaaccaccggttaagagtcgaatttttgtgccctgcatgtgaacccctgatgaacaatcctggttacaacagcggcccacgggagggccgccgaaaaaatatggtgagttaagtacgtcggttagaccacacggagatgaaaatgtcgcatgttgacgtgaaataaacataagggtcaccgccgcgcaagcgacagtgacccctaattatgcgcaggagcccgtagtccagcaagggacaacgggcctaacagatggatttatgaggataattcgtgcgatttgcttaccggagtacggttgttcagcacatcatccagctgtttcgcgtccagctctttgacccatttagcgacaactatggtcgcgacgccgttacccaccaggttggtcagcgcgcgcgcctcggacataaagcggtcgatgccaagaatgagcgccagaccggcgaccggcaggtgcccgacggcggaaatcgtcgccgcaaggacgataaagccgctacccgtcacccccgccgcgccttttgaggagagcaacagcaccaccagcagggtgatctgatggaaaatatccatatggctgttcgtcgcctgggcgataaacaccgccgccatcgtcaggtatattgaggtgccatcgaggttaaaggagtaccccgtcgggatcaccagccccaccaccgacttgcggcagcccagcttctccatcttatcgagcatacgcggcagcgccgactcggatgaagatgtccccaggacaatcagcagctcttcgcggatatagcggataaatttaaagatgctgaagccggtggctttggcgatcgaccccagcaccaccaccacaaacaggatgcaggtgatgtagaagcagacgatcagttggccaagctgcaccagcgtaccgacgccgtatttcccaatggtaaaggccatggccccgaacgcgccaatcggcgccaggcgcatgatcatattgatgatgccgaagatcacctgcgagaagctttcgataacgttaaaaatcagctggcctttgctgccgaggcgatgcagcgcgaaaccaaacagcaccgcaaacatcagcacctgcagaatgttgccgctggcaaaagcgccaattacgctgccggggataatatcgagcaggaacgctacgatgccctgatctttcgcctgttcggcgtaaaccgccacggccttcgcgtcgagggtcgccgggtcaacgttcattcccgcgccgggctgcaccacgtttacaatgatcaggccgatgatcagcgcaattgtgctcacgatttcaaagtagagcagcgccaccgccccggtgcggccgacggctttcatgctctccatcccggcaatccccgtcacgacggtacagaagataaccggggcaataatcattttaatcagcttaacgaaggcatcgccgaggggtttcatctgcgcacccagttccgggtaaaaatggcccagcagaataccgatcgctatggccgagagaacctggacatagaggcttttaaagaaagagattttcatagggtgtcctttggagataaccacagaccttgagggggtattgcgtccgtggcttaaaaataacacccatgaaacatttcagaaataacgagtgatgaaattgcaatgcaattgttaatttatttgaactgactcgcataagctaacaatgttgttacaaacttgcatcctcaacatcaccgggtaaaaaacgggccataaaagcctcaggcggcatggcgcagccaaaaagatacccttgcaccgtctcgacgcccgcctcctgcagccagcgatactgggtatcggtttcgacgccctccgcgacaatgtgcagattcagcccccgcgccagctggataatcgcgggcatcatgctgatatcatcgggcagcatatcgataaagactttatctattttcaggatgtctaccggcagcgatttaatatgctgcagctggcgcaggccggcgtagcccataccaaagtcatcgagggcaatccgcacgcccgcttcacgcagcggacgcagcagggaaataatcgcctgcgggtcgtctatccgacggctttcggtgacttccagtaccagcgtgcccggcgcgatacgatagcgcgcgagcagcgccagcatctcctcgccgcgatcgtgatgcagcagctgcagcaacgacacgttgaccgacagcggcaacataatcccctgattttgccaggcggcaatctgccggcaggcctcttccatcacccagtagccgaccggcaccatcagcccgcaggcttcgatacgctcaatcagatcgcccggcagcgaccagctgccgtccgcctgacgctgacgcagcagcacttccgcaccgcacacctcgccgctgtgggtatccacctgcggctgcagccagatggcaaactgctggttatcaagcgccgtcagaatatcgtgctcttccattaagcggcgctgcgctttttccatctgctgcggatcgaagaactcaatctggtttttccctttacgacgcgcggttacggcggcggaaaacgcccgacggtagagctgttcggcgttaatttcgccgttaaacatcgcgataccgacgctggcgcaggggcgcagctggatgccgtgcagcggcaaacgttcatttaagacagtgagtacttgcttacttaacgtcaccgcctgccagggttcgtcaatgccgtgggccagaatcgcgaagtcgtagccgctcacctgagccagcaccatctgcgccggaataatcgcccgcagcttttcaaccagggttagcagcagcatttcacgctgcgtctctttcagtacgccagcggtatcctgtagcgtttcgcaggcgataatcagcagcgccgaggcctgcggtcgcgcgacggtttgctccagcatggccattagaaaggctttgttcggcagctcggataccggaaaacgggtcgattgcaaagagagttcgtcgtgcaggcgcagcagcgtctgctgattacggttgtagctgcgcaccagcatgccgatttcatcgtcatgatggagacgcggcagcgtgagctgatggcccaaacgctcgtgctgcgggacatcgtttagctcacgggcgattttacgcagcggtcgtaccatcagacggttgatgcaccaggtgatcgccaccgtcagcatcagcaccagaagcaagtaagcggtcactaacgtcgccagcgcgctcatgacgaatttatacatgcggtatgagtcggcctggagcaccagataggccagcggctgtgggttagcgggccgttcaagggagtagataggcagcgaaatctgtaccggcagttcaaacatacgggtgatggttaccggtaccgggcgctcggggataaagcgcatccgcagcgcctggaactgattgggcaggacaacatccgcccggctgacgatgcctgcgggttgaatacggctcagaatggcttccgcctcagggatatcggctttcaggatagccgctgacagcggttcgcgaacggaacgcgcgatgctttctaactgcgtggccgtggtaaaacgactctgctgaacaaagtggaacagcagaatagaacagaagaccagtacaaacgccatggacacgctcgcgaccatcgccatctgtttaattgtaagtgaacggctgacgcgcaacggggttctccactgaaactgaacgcatatcgggtataggtccctctcaccgatcgttatcaggctgattatatactcaaattgttcgctcacgcccgcaaggcgcaaagcaatgccatcaggccgctttcccggaggcggcgcaatgcgcctgtccgggctacaaaatccgcaggcagcaccgacctgtagccccggtaagcatagcgcgaccggggaacattcccgggtggcggctaacgccttacccgggctacacgctcacaaccgccatcgggccggtagcccggacaaggcgcccctggcgccgcctccgggatgcagcgcgctacgctgcttccgcaccaccggaggggaaatcgggctgcctggccggaggcaacgagtatacgcgaagagcgccgcggagtggcgccctgtcgcataattcagcctaatccgctaccagtcggcataaggaaccaacggctgcggcggcatatccatatcgccctgccagccggaagccgaatagcgaacgtacagcagcgcatggctcggggtgtaatccttcgcctgctggatatccaccgccgccccgacaaaccagttgctggtcacccgtcgttcaatcagcgcccgtgcggtatagccgacgccagaactgctgctgccttcttccgtgagctggctggcatcatgacgatactgcgaaggaatcaaattgagcagcggatagcgcgcctcggttttggtgcgcgagtgggaccacgataccgagccccccagctcccatgaccagttcgccgtccgctgacgccaggtaaccggcgccgagaaggagacatattcctgcggactgtagtaaccgccctgacccagcgtatagccgctgagatccttatcgtagtgccagagcatattgttcaggccgacggtgacccggcggttatcttcgttaaccactttatagtagtagccggtcatccagcgcacgcgccagttgtcggcgacgtttttcccggtcaactggtcgacgcccagcgaagaccagacgccgttggcctcgcctttatcgtagctcagactcagaccgccgccgtcggcgcgcaccccgccccaggtcttgccggtatggccgtcgttagggttgtctttctgcccgccaaaggccagcagcgagctggagatggggcgtcgatggaggttcacggtgtagcccagcggaccaacgtcgctgctgtagctcaggccgcccaccacatcaacgacgttaaagcccatcggcgtggtgccgatatcgccgctccaggtatcgttcttccagcccaccgcgacgctggcgccgctatcgctctgatgtttgctgccgccgctacaggcgatttcaccgcaggtgccccagctcggcgaatagctgccgtcgctgttcgtcgaaaaactcccggcatccatattaaccagatcggtacggaagaacattcgcccgtcggccagcggcgcatccacatgcagcatcgtggtatgggctttcaggtcggaatagccgccggtaccgctggagccccagtaatcatgttcgagggtgacgttaagatcctgctgacgataaagatccgccgcgtcgctgcggatcccgcgcttcagccagtcatcgctgctgtcgttacgcgtcagccgcgtaaacgtgtcgttatcctgcgggcgctcgcgggcgacgccggaggccaccattgcatctttatagccttccagcgcctgctgcggctcgccgttctgcgcctggaaacgcgcggcgtcgcgcagcaccagcgcgctttccattgacggcggccacgctttcgcctgcggaacgatgcgggcgaaggtttgctgcgcctgagcgcgatcgcccaacccggcctgcgcctgggcgatacgccgctgcatattgatagaatcgatgtcgtcgcccttgagctgcgccacctgggcgcgggcggcgtttttatcgccatcggcaagatacacttccgccaggcccagacgcgcatcgccgttgtcaggctgctgccccagcacccgctgatattcagcaatcgccgtctggctgtcgccgcgctgctgcgcccagtccgccagcgtgagcgcgtagcgcaccgacgtcggctgctggttaatcagggcgatcgcccgggcttcctggccgctatcgcgcagctgattcgcctggcgcaacacgttatcgctttgcaggcgcgcctccagctcgcgaatattgtccgtccactgcccgcgcggcagggcgttaatctgcgccagcgccatctcatcctgattattcccggataggtagaggccgtaggcgtaaacccggtcggcatcgccgggctggcggttgaccatcgcgcgcatgatggcatcggcttcgctgcggctgcccgcgctgaccagatcccgcgacaggcggtaggcgatccacacgctatccggatccagcgccagccgtctgcgctgcacttccgccgcctgcgcccagttgccctggctctccagcgcttcggcctgtttctccagccgatcgttcgtcaggctgcgttcgatatcatcaatactgcgccgctggcccggcgacaggctggcgatgtacgcgctggctttttccggcgattcggcgcgatacagattcgccagaccgcgcaccgccaggctgttgctgcgatccattcgcagcgcgcgctggtagtagcgctccgccgccgcgttttctttacgcgccgccgccacgtcccccagccccagcaccgcatagctgtcggtattgtctatgcgctgcgcctgggcgtaatgattttgcgcctgcgccagctggccgcttttgagggcgctatcgccctgcttaatcagcagccagtagcggttagtcttgagcaggctgtcccacttatcgcggctcgggctatccgggtccattttgatggctttactcaactgggcaaccgcccgcgcccgatcgccgcgctgggagtacgcctgccccaatgcgccaaccgcgtcgctgtctttggcatccgcccgcacagcctgctgcaaatcggccacggccaccgaacctttcccggccttcaccgccgccagcccctccgcgcgatcgcggaacgtcgggtcttttagctgcgtctgctgctgagcgagcaggacgcgggcattcgccgaggtggaaccggtgggaaactgcatgagaaagcgctgcagcgcctgcacgctggcccggctgaccggcatacttttcacttcgttaaaccagatgtccgccgcgataccgcgccccgccgccgagcgggacatctgctccagataagcaaatccctcttccggcttattatcgccaaacatctgtttcgccagcgccgtttgcagcgggacgttgcccggcaagcgggcgttgagttttttcagctgattgatgccttcgttatgacgggcgggcagccgcgccaccagcgtccagtactcaatcgccgcgtcatcatcatcaggaacgccgttaaacagcttctcgtaagcggcgatggcctcatcaaccttcccggccacgcccagcagacgagcctgctgcagctcctggcgaccatcgccggtgctgcttttcatttcgtcacgcgaggctttcagctcgggcgattccggcgccagcttcgccagacgctccagctgctgcttcgcgccggcggtatcgccctggcggagaagatagcgcatccgcgcggcaacaacgtccgggttattcgggtcgatcaattccaggcgatagagcgactggcgcaccaaatcctcacgtttgctggcctcgccgaggcggacctgctccagtagatgttcctgaacaggcgtagtcgcggcgtgcgccagcggcatcagcgcgacgcctaaggagagggtgaataagcttagtgagaacttgtgcattcctggttccagtcaggccgtaattcgccaccggcggtgaagcgaaaacggtgttgatcccatccctggccgaaaagggtcaggaccgcgctgtagtaagcatccgcgccgggatagttatcggcgacgcgctggcgctgaatggcgcgcgcatcttccttctgcaagaaaggcagtagcgcagcggagaagccaaccggaccgttgccggtagttttaccggtcgcgatgttggttttttccggcggcacgccctggtcaatcgtccgggtcgccatcggtttaaaacgcgccaacaggcgagctttttgcttatcgccgtcatcgagcataccgacccacagatagacgcgaatggcgtcatagctgccgataatgggtttatccgctttcagctgccagcctttgcttttttcgtaacgcacccagtcaggcgaaaaacctttcggcgcggtttccagcagcagatgcagattgccgtcgcgtatcttcggccagggagcgccaaacgcggcaaagtaggtcgccagctgcggcggcagatagctgggattaaaacgccagccgcggtcatcgacgaagccaactctccccggcagaatcatcggccccagccccggtacggtggcgacctcttcgtcggcaatgcgcgccagcagcgccttgcctacctcggtgtactgaggtgtgtcccacagacgtccggcctccagcagcgcccaggctatccacaaatcggagtccgaggctgaattgttgtccagcaccgtccactcgtcatcgctctttttcccccacagccagcccgggagatgcgcgcgcaaatcgccctcggcaaggttgttttgcgtccactcgaacagcttgcggaagccgtcgcgatcgttagccgccagagcaaagaacagcccgtagctttgcccttccgaggtggtgatttttcgcgcatcgctggggtcgataattcgcccttcggcgctgacatactcttttttaaactgctcccaggccggccactggcaggcggcgctcacctgcgccgccgccagcatcaataccgataacaccacaccgcgcaccgcgttcatcatcaattactcatcatcaaggtcgaggcgacggcggctgataatacgcagcatgcgccatagcacccatgccagcagaacaatgctgaccgccgccagaatcgccaacagcaccggatggctggagagcgcaaaccagatacgttcgaaccacggaaggtgcccgatatagtaaatatcgcccaccctcaggctgttgacgcccgactcacgaatcaccgcaacggaaccaaacatcgccgcgcgtttaccgctgtcgttaagcgcctgggtcagcagttcgttaccgcgcgggctgtcggccagcagcgccacgacgctgcgctgatcgttgtacggcgactggaagccaataatcgccgccatcggcccggtcgacgtgacgtcggtgcgggtattcggcgttctggcctcggtatcaggatagatgctggccagatcgtagtggcgcatcggcgttttcacccagcttttggtcgcttcaaccagcaggttgattttcgtgtcgtccttcagcgcctgcggaatggagccaatcagcagcaggtcggcgtctttgtccttaatctggctgccgtcgtcggtcatgcgcaggttaatggccgccaggccggtttgcgcgccaatgccgccggccgtctccagcagcgtggcaacctggccctcggtcggcgatttgggcaccacgaccagggtatcggcgagatcggccatccggctgtacgggaagcccgcgttagcaaatacgcgcagatccggcatcgccataaagtgatagtacttcgagaaatcgatggtcgagtcgtcgcctatcaccacgtggttctgcaccggctggaaggtaatacagttatcgatagaaccgcccggcatcgggttcatatactggaagtcgaagcgcagctgattcatggcgccgaggcgcaatgccgggatcgtcacttccgttttgccgtccagcagcccctgcagcaccggcaggcgtagtaacagcttattcacatcctgcgagctgttgaggctgaaggactgtaagaaccgatcgttaaggctgatatccatgcgcgagctgtccttgataggcggcatggtgtagcgatagttcaggttcatatcgatgccgttggcgcgcagcaggtagaggtccggcggcaggttcagcgccacgttgatggaatccggcaccaggccgctggattgcagctgctgttcgtaggttttcagctcggcaaaggtcaccgcccgatcggtacgcacccagttcggcgcatcgtagggtttacgcgcctgcagctgtttgacatcgtcaaccgtcacgctgctgccgcggaacagaatattgccctgggctatccccttcgccgcctgcagcaggtctttgtcatcccgcccgaagaccaccagcagcttgacgtacggattatccgggtggtcgatcatttcaatcgtcggcgccttaaccggcggatgctcgcgcaggaagtcagggcgcttatcgttggtcgcaaacacaatggcgttacggtccggcagttggttgaactgcaccgggaactgctggccgcgccagcccgccttgctgccgaaccaggaggcgacgatggccgccgcctgctgctgcaggacacccggcgcggaggcaaagaccatcggtagcgtcagctggcggttatcgcgcgaatcgtagaacggtaccgggaaatgcgaaagatcgttgcgcacgttcagcgactggtaggttaaatccagatagctttcgcgaccgacgtccagccacaaggtgctgctggccgggttttcacagacatcgcgatagtggccgacaaactcaaggcgcacgcggttaaagtcggtgatatagagcggatcgatagggatctgcgcgctgacttttttacccaactgctctttagtgaccggcagcacgcccatcagctcatcgttaagataaaccttcagctgcgactgcaccggcagcagcgacggagagggcgtgtagtcgagattcagcagcgcttttgccaccacttcatcgctgcgcataccgaactctaccgacccctcagggcgcgcgccgcgcagcaccatgctgcccggcggcggggcgattttggcgaaggtcagcttcacgtcgcgggtcggagcgttatccagcaccaccaccggcgctgccggatcggcaagcgtcgccgtgggctggctgtccgccaccgtacccgcgataccggggaccatcgtcgtcggcccggcctgagtcgccgccgccgtcggttccgcatacgaagcgaagggagaccatccgctaatacccaccgctactgcacaaatcaaagagagttttctgttcatcaatatgcccccaggatccccccacctatggaggtgagagaggagtggaggcggttttcgtgcatgaatactgtatatttgatcactatcaataaccctcgcataattgtgcgtatcttgcgaaaccatgaaacgcgcatataaatttcgattctatccaacgcccgagcaggctgagcttctggccaggacgttcggctgtgtgcgtttcgtctacaattcaatccttcgctggcgcattgatgcctacaacgaacggaaggagaaaatgggctacgtccaggccagcgcccggttaacggccctaaaaaaagagccggaatttgcctggctcaatgatgtttcctgcgtgccgctacagcagtcgctgcgccaccaacagaccgcctttactaactttttcgccgggcgtgccgcatacccggcattcaaaagtaagcgccataaacaagccgctgaattgaccgccagcgcattcaaatatcgcaatggcaagctgtatatggcaaagagtaaagcgcctttagacgtgcgctggagccgtgaattgccgtctactccatctaccgtcaccctttccagagacgtcgccgggcgatatttcgtctcctgtctctgcgagcttgagcccgtatcactgccgatcaccgctaaaacggtcggaattgatgtgggtttaaaagatttgttcgtcactgataccggatttaaatccggcaatccccgccatactgctaaatacgcggcccgcctggcgcagctccagcgccgtttaagcaaaaaagccagaggctcaaagaaccgtgccaaagcccgcttaaaggtggcccgactccacgcgaaaatagccgattgccgtctggatgccctgcacaaagcatcccgcaaactgataaacgagaaccaagttgtttgcgtcgaatctctgaaggtgaagaacatgctccgcaacccgtcgttgtccaaagcgatagcagacgcaggctggggtgaattcacgcgccagctccggtacaaaggcgaatgggccgggcgttcagtggtcgcaatcgaccggtttttcccgtcttcaaaacgctgtagctgttgcggtttcaccatgaaaaagatgcctctggatgttcgtaaatggtcctgcccgaaatgcggggcagaccatgatcgcgacattaacgcggcccgtaatatcaaagcggcagggcttgccgtgttagcttgtggagtggctgtaaatccttaacccccctggggctaaggtcaccaccgtgaagcaagaatcccgctcctgagtcgagtcaacgcaaaggtgggggaatacgtcaacattgttgagccatcgccggttctgccgagagtgtcgccgctgcgcgttccggacggcgcggaataaacgagacaaaccaggccaccagcatggtgagcgagcggaaaataaccttcaccgacggcggagaaaactccgccaggtgacgatatccacggaaccccagcttcaggatatccagcaggctttccatcggcttatcttccgggaagctatcctgccaaagcgcccacgtatctgcgcgggcaaacgtacactgtacaaaatcaatatgctgttgattgcttaacggcagcagctgtagcccgacctcgctgccgttgacccgcgcgacccgcaccgggaaggcgtactcctgctgcccgcgtttcagcaacagcttgacgtgctggctttccagcacctgcgcctcgccgtgaatcttgaccccaaggcccccgtctgagtaatcatggacggtacaggagaacaggtgcccgtcatcgcgggcaatcgccgccggcatcgacatctccacgcggtgcgatcgccgcacctgcttgctttcaaccgagaccgccaccgcgccgccgagaataatcaggttatagaacacccagataatgctcacccagacggtcaggatttcgttttccgggccgtacataaagcgccagatccccaccccgacgccgaccaggttcagcagcacgaggtagatatagggacgagagatcacccagtcgacgtactcgtcctccaccagtccgccttttgccgtcacgttgaatttgcccttatgcgggttaatcaacgcgacaaaggtcggcggcgcgatataccacgccagcaccgtttcatagatctcgctccagaaagagtggcggtatttgccctgaatcttcgagttggtcaggctggcgtgaatcatatgcggtagcacgaacagggcgatcatcagcgctggcgcatagatgatataggcgtgcagcagcagaaacgccagcggcgcggtcaggaagatcagccgcggaataccggatagaaagtgcagcatcgcgttgacgtagcagatgcgctgcgccagcttcagccctttgccaaacaaggggttatcaaggcggaaaatttgtaccatcccgcgggcccagcggatgcgctggccaatatgcgccgacaggctctccgtcgccagaccggccgcctgcgggatacgcatgtaggctgaagtgtgcccgcgacggtgcaggcgcagagaagtgtgggcatcttcagtcaccgtttccacggcaatgccgccgatttcatccagcgggccgcggcggatcaccgcgcaggagccgcagaagaaggtcgcgtcccacatgtcgttcccgtcctgcaccaggccataaaacagcgtgccttcgttcggcgttttgcggaatcgtcccaggttgcgctcaaacgggtccggggagaagaagtggtgcggcgtctgcatcatcgccaactctttctctttcaggaaccagcccatggtcatctgcaggaacgagcgggtcggcacgtggtcgcagtcaaaaatcgacacgaactcgcccttggcgtacttcagggcgttgttgatattcccggctttcgcgtgttcatgggtggtgcgcgcgatgtagtgcaccccgacgtctttggcgaactggcggaactcttcgcgcccgccgtcgtcgaggatccagatattgagcttgtccttcggccagtcgatcccctgggaagcgtaaatggtgtttttcaccacgttgaggtcttcgttgtaggtcggcacgaaaatatcgaccgtcggccactgcgccatatcctccggcagcgggaccggctgacggttcagcggccagacgacctggaaataccccagcaccagcaccacccaggcgtaggtttcggcgaacagcagaattatcccgcacacgaggctcacgggatcatcccagttgagcgtcgaggtgtagcgccaccagatgtagcggcaggagacggtcagcgacagcacgatcagcatcagggccgaaaagcgtcccggaatgcggcgcaccagcagcgccacgccccacagcagcagcaggaaaataaactgcgagagcggattaaacggctgggtaatacagagcagcgcgaggattagcgagaaaaaggttatcgtgcccagaataagccgccgcagctttggcgacaggtgagccagctctttatgtttatccaggtgaccggtgcgggcgttaaccttttccggcagcttttccagccactgggcatagcgcccctggacgccctccagcgccgccagcgaacgccagttgatctttttatccggctccggcacccgcgtcgccagcagccacacgcactgcagcaggtagcgaatcgggtccagcgggcgcggccgatgcggattaatatgcgggaaaaactcgccgtgacgttcgcgaatagcctgccagcgaggcgtttccagcggcataaacgcccatgccagagatgcccacaggcagcccagcgcggcccacagccacgacgcgccgtgctggcgatagtcgcgatagcgctcgttcagccgtttcccgaccggcggcgccagcagtagggtgctcaggcgaatcattccgcccccttcccggcgtagtgcagcagacaccagttggccagcgtcagtatctcctccgccgccagagagtcctgccggtactcgccgagcggctgcttcgccgccagacactccgccatcgcctcatcacgatggatggtcaccggcagaatgcggcgctggctctccagccacagctgatacaaatcctcctgcagctggctgccgacgcgcagatcgttaatcaaaatatcgctattgaccggcagcgcctgctgatgcaggcgaatatggctgttgccgtccggatgcacgatgaccagcgtgcggtcgcagacgtcaatgagggagcgggtcagcggcgagtaaccgtccggcaggtcaatcagcagccagcggtgatcgccctgctgatggagcttctgcaccatcccggccatcggcgccagcgtcggctgaagctggtcaatgttcgcgcgctcgcccggcgtcagctgaccaaagggcaaaagatcgatatgcgaggtgtagcgcaaaccggcgtcgcgccagtcgctgccgtcgatcgtggcgcgcgcccagcccgctttgtggctgaaatcgacgttgaaaaaaaagcgcaacatgttgtccgggctggtgtccaccaccagtacggtttcaccgagtaattgcagcgcccaggccagcgcagcggtaatcgacgtggtgccggtaccgccgcgcacgccctgtaatcccagaatcgccatcgacggcttccttactttttctctgctaattcagccagtaatggccagcgttttagcgccgcggttaactgctcgcgtcgggaaatatcgtggtagtgaatatcaggcagggaaaatgcccggcttaacgccaggaaatcattttgaaacgtgtagcccaaagtcgcatcggtgggtacagcaggctcttttgctggcatttctctgtccgttggaaaatacaataaattaaaccgagaggcgtaagatcatccttaaaatatgtttacatgctaaaactgatgtcctttaatttcaatgttaggtttactctgacgctttcgctagtaaactaatcaagtgtaaatcaagtctcacgagggacgccgtggatatcgtatattctttgggtatttcatcattatgggacgaagtacgtcatatgcccgtgggtggagtatggtggctgaatgtcgaccgctatgccgacgcggtaagcctgctcaaccatacgctggctgcccaggataaacagagccaggttgcggcgatagtcatgggtgataacccaaataaaatcattgaactagagaaaaatcgcgggccagaaaagatcgcgttatttagcatgccgaaccgtgctgaggggctgcaagaaatgcaccgcgatttagtttgttccctcgaacctggcaattatttgtttattctgctatgcgctgaaaatgcctggcagaatataaaaagcgatgatttatgcaattgggttgagaaatcgtatcgatggactaattatcatcgttgttcattactagtacttaattccgggcacgatatcgataagcaactttcccctttattacgcgagtaccgctcgctttccggtctggcaagtattcgttaccagggggataaccacctgttcgatatcgcctggtgggggagtgaaaaaggcatcagcgcccggcagcagctcattgttcttcaggatgaaaacggctggcggctggcgcaggatgaagaaacggtggtgcaaccgcgcagcgacgaaaaagtcattcttagcaatctgcgcgtactggaaggtgcccccgcgctatccgaatactggacgctgttcgataccaacgacgccgttttcaacgccgggaggatggcgcaggcggcaacgctgatcttctccattacccagaacgaacagattgaacagctgggacgctacatccataccctgcgccgccagcgcggcagtgcgttaaaaatcgtcgtccgcgaacaaacgccgagcctgcgcgccaccgatgaacgcctgctgctgagcagcggcgccaatatggttattcccagcggcgcgccgttatcccgctgcctcacgcttatagaaagcgttcagaaacagcagtttactcgccatattccggaagattttaatactctgctgacctggagccagccgctaaaactgcgcggctatcagaaatggggggacttctgcgaagcggtgcacaatattatggccaacaccatgctgcccgccgatggcaaaggggtgatggtggcgctgcgcccggcgcccggcctgcgcgtagagcaggcgctgacgctgtgtaagcccaaccgtatgggcgacattatgaccatcggcaacaatcgcctggtgctgtttctgtcattttgccgggtgaacgacctggataccgccttaaaccatattttccctttaccaaccggcgatattttttctaaccgtatgatttggtttgaagataagcaaataacggctgaaatcatgcagatgcgcgggattctgccggagaactggaacacgccgctgcccatttcgcttggcaaaaatgaaaccatcaacgccacccatgacgggcgaagctggcggcgcaaccccgaggcgcaccgtctgtccattgatggggagccaaccttatgatgtctatcgccgatattattcagctggtcgtcctgtgcgccctgctgttcttcccgctgggatacctgacgcgccactaccagcggcgtattcgcaccacattaagactgatgttctttaaaccccgttatgtcaaaccggctggcgtgctgcgccgggaagcgacatccaggcaaggcaaatcaacgaaatgaccaaacccaaaacacccaccgcgtcgcttccgctctggcggtactggcgaggcttatctggctggaacttctactttctggtgaagttcgcattgctatggggcggatacctcaattttcatcccatgttaaacctggtgtttctggccttcctgctggtgccaattccgcagtataagctgcaccgcatccgccactggatagcaatcccgctgggttttatgttgttctggcacgacacctggctgcccggcccggaaagcattgccagccagggctcgcagattgccggcttcagcgccgactatatctgggatctggtgacccgctttattaactggaatatggtcggcgcgttcttcgtgctgctggtcctgtggctgtttatcagccagtggctacgagtgacggttttcgtttcagcgatcgtggtctggctggttgtcagcccgctgatgccctctttcaccctgtggccggcaggtcagccgacgaccgcggcggcgaacaccgccgttaatacgggcggtggaacggccatcgcgaccaatactgcaccggcgaataacgatattccgccgcaaaccgagccgccgacgtcggccaatctcaccaactggctgaatgccttttacgcttccgagcaaaaacgtaaaaccactttcccggatgcgcttccggccgatgcccagccgtttgatgtgctgataatcaacatctgctcgctctcatggtcggatattgaagcggccgggctgatggatcatccgctgtggaagcatttcgacctgctgttcaaaaactttaactcggcgacctcttacagcgggccggcggcggcgcgtctgctgcgcgccagctgcggccagctctctcatgcgaacctttatcagccatcgggcagcgaatgctatctgtttgaaaacctggcgaagctgggcttcacgcagcagttgatgctcggccacaacggtatcttcggcgacttcctgaaggagcttcgctcgctgggcgggatccagagcccgctgatggatcaaagcggcctgccggtgattttgcagggttttgacggctcaccggtctatgacgaccaggcaacgctgaaccgctggctgcagacgctggataagctgaatacgccgcgcacggcgaccttctacaacacgctgccgctgcatgacggtaaccactatccgggccagagcaaaaccgcggactataaagcccgtgcgcagaagttcttcgatgagctggataatttcttcaccgaactggagaaatcggggcgtaaggtgctggtcatcgtcgtaccggaacacggtgcggcattgaaaggcgacaaaatgcaggtttccggcctgcgcgatattcccagcccatccattaccaacgtaccggcggcggtgaaattcttcggcattaaggcaagacaccccgatgcgccgattatcattaaccagccaagcagctacctggcgatttctgagctggtggtccgcgccctcgacggcaagatgtttgacgaaaacgacatcaactggcagcagtatattgccaacctgccgcagagcgcggcggtgtcggaaaactccaacgccatcgtcattcaataccaggggaaaccgtatgttcagctgaacggcggcagctgggtcccttatccgcaataaacgaaaaaggccgcaggatgttacccctgcggccccgttcgggcgcatgctgccactagggcaggcagatacccaccggccggctacttccggttatccatccggctcacgataatgctgaccagaattccagcaatcaccggagccgccagatcgtcccacagcaccaggcccaactgagcgagcgtcatacagccgccttgttgcaatggcaaccgttcgcggctattctcgaattgttgaggttcgagattagcccccgatacgttgccaggttgataccaaacaacgtgcgggggttttctctttccagcaaccatctctctatgccgccggggttcaagcccccgcaacattgcgcctcaccgggcgagcccggcttgccgactattctactggcccgatcgggtacccgcactccgccattacgcgcggtgcgagacgcattccaggaaacttttttgttgcagcaatacaacgaaaaaggccgcaggatgttacccctgcggccccgttcgggcgcatgctgccactaaggcaggcagatacccaccggccggctacttccggttatccatccggctcacgataatgctgaccagaatgccagcaatcaccggagccgccagatcgtcccacagcagcaggcccaactgagcgagcgtcatacagccgccttgttgcaatggcaaccgttcgcggctatcctcaaattgttcaggtttgagagtagcccccgatacgttgccaggttgataccaaacaacgtgcgggggttttctctttccagcaaccaattcatctctgccgccggggttcaagcccccgcaacattgcgcctcaccgggcaagcccggcttgccgacgattctacggcgcccttcagatttcagcacccggctcgactgcgttattcgaggcgcattccatagtttacgcctggtctttatttgccagccataccagcagcttcaggctggcggagtaatagtcgtcctgcggcgtaatctgcggatcggcctgcgcttcgccaagggttaaatcgcgtaccgccagcagcccgccggtcataaaccacggcgccacttcatcggtattcacgtttatccacgccggcgtctgcagacgcggatagcgctggaaccagtttttccacggcgtcagcaggctgcttttcgggtcactccagtagacatacagcggaatacggatcgcatcgaagctcattcgcgtcggccactcttttgccggctccatcttaccgtccgctcttaaggccacccagtcgctgggaagctgcgatttcccccacgccattttccccagcagcgcctggccatcgctctgcagctttctccaggcggttaaatgcgtacgcgcggcgaaggcctgccacgccggaaagataaagtaggagggattaagattcaggtggtcgttgagatagaatccctttgcgcccggaagcatcacctgacgaccggcaaacgtgaccaccgtagacttcaggagcgaagcggttatcgcatccgacgcgctgccgtaggatttttcatgccactgctgctgcgcgcgcagcagcgcccaggcaatcagggtatcaccatcggtggcgtcatttttgtccgccaccggattgggcgccaccgggttatagcgccagtaaaacaacccgttatctttgttgcgtagggttttatcggtccactgccatagcttgtcaaaggcggagcgatcgttattggccaccgctaacagcatggcaaaaccttgcccttcggtatgggagacgttgccgttgccggtatcaataatgcgtccgtccggcatcataaaacgcgatttatagctttcccacgccgtatcggcccacgcgtggggaagcatcatcaccgtcgtcaccacgactgtcgctaaagcacgcaaggacataaattcacccttcagggatggaagtaaagaaactgaacgtcagagaccgaaaacagccgctcgcgctgtaacaccacgtgcgccgcgccgccctgtccctgtagccagcgggaataaagcccctcgagtatggcacaaaacgcattacaccagcggacgcggcgcgcttcatcgcggctcaccggcagcgcctgatggcgtaaccgcaggccgtcatcgctaacctcaacgctcactacgccccactgaaaacggcttagctgcgcattcatattggcttccagctcaccgagcgtttccgacgccggtagcggatgctcatcggccagcgcctcgcccatttgccgcagaaagggctggctctccagctcgcccgcgttattgaccatgccatcaaccataatcagcagcagatcgaaccacccggcaggggtttgctgctgctgaaaccaggccattaccagcgcattgttattgtccgtcacgatcagcgatctcccagcatgtagcggatatagaggccggcggtgctctcgttgtaatcgccgaaggtgtcataacccacctggccgccgagcgtcatctgtttattgactttgtaatccgcgccggcgcgcagggtatagccgatgccgctcttcgaggtggctgaatagtaggcctctttagcaaaaccgttgctaacagcggtctcgagcgtttgctgccactcggcgttggtcgggaaataggcgctcttatcctggctgtaagattgataccccaccgaaccgccaagcttcatcgtccagttatcatatttctccgtcaggctcaccggcagcgacacgctgacgtagttctgcgggctgaagtagcccccttgcccgtaggtgaagtagctcaggtttttcgagtaatccatgtagctcatactcagcccggtctgcagctgacgatactcatcgtggtaaggccgcagataaaccccggcgttggcgttgatgctggtattgctggcgacgttttgtcccaggtagctatagcccccgccgccgacgtagaaaccggcatcgccatcgtcgtagctgagctgcagggtaccgccgtttttggtcacctgaccccaggttttgccggagtaggaatccttcagccccacccaagagagcaggctgtcggtcagcgaacgacgctcgccggtaaaaatcagcgacagatagttagtcagcttcggcgaccacttcacgccgcccaccacggtattcagatcctgacccagcggcgtgctgccgatatcgacgcgatattcgtcgccgctcagcgccaccgccagcgccacgccgttggctttttgtgaatcggttgagccgctggcccgatcaacgttaggtttcagatttgaagaagccagatagctggcgacctgcccggaatcgtaagcgcccagcttcgccaggttctccatgccgctgctggtggtggcgttaaagtctgaagcattcagcgtgccgagaccgctcaaggtctccgcccccggattgttggcaaagtacgtcgtgcgctcggtatcggtcatcgccgcaatcgccgcctgctcgctggtggcggtggaaatcatattggagaccgcgtttgatagcggattcgcgccatagcgccgccaggcgtccccggttgccgtccctgcgttcaacgtaatcggcgtcacggtaaagtcgaaacgcgaatcaccgaacggtgaagaggaccaggtcagcggggttttgatttcggtcagcttgctggtgccggattcgccatcgcggccgcgaacctccatgcccccctgcagccaggtcccggttttttcctgcaacgtctccatcatggtatccacctggcgcagcatccgggtgtgcgcggtttcgaccggcagatcggtgcgctggatccccggcagcgtgctgccatcgcccgtcgatacctgtgaaacctgccacggcatatattgcccgtaggtggaggcggtacgcgtcgccgccggcgtgcgcgagacgccgacgaacggattatccgccgccagcacgccgcccacggtcggcgtttgcgtgccgttgctgctctgtaaccccagcagcctgccgcgagcgctgcgcagataggtcatcgcctgctgatgatggccctgcgattcggccacgcgcgccagcagcagcaaacggtccggcgaattatccgggcgcagcccgcctgccagctgcgccgcccggtcgttatcgcccgccgacagcgcgacatcaatagccccgctgcgcgcgtcctgggtcggcgtatcgcgggtcatcaggtagtcatagacgaccccggcctctttattcattttgccgctctgatagagacgcgccatggcgaacatcaggtcggtattttgcgggtcgctctgcatggcgcccatcagcttgtcatacgccgccgcgtagttaccctgctcgcgcaggcgatccgcgtcgttaatcacatagccgttgcgaatgctggccagctgcgtcggcgtactgcttgcctgcagctgcggattagtgagcagcctctgcgcttcgttggtcaggccagcctggttaagcaccgtcacctgatcggcgtaatccccggcgttgccggagataccgccgttaatattgttacgcaccagcgataccgcggtagtgacatcgccgctctgggccagcaggcgcgccagtttaccgacatccgccggggcttttggcggcgtcgcggccatcgccctcagcgtattggacgccgcgacggaattaccctgcgccagatacccctcggccgtcgccagctgcaggttgtagttcacccgctggtgcaaatcgcgcatctggctggtctggctggcggggggaattcttgccagcagcgtttgcgcctgctgccagccgccgttctcgctggcgaaaagggcggcggcgtacagcgagctgctgctggcgccgggacgatacgcggcgcccatcatcgcgttcgcctcgccgtcgttaccggatttttgcagcagtcgggccagatcgaggcgcatccacgcatcgtccggatagcgagaaacgccctggcgcagcgtggcgatcgccccggacacgttaccgccgccggcctgctcctgggcctgtcgacgcagggagtctcccggcgtcccggtgaccacgcgcggctgcagcttttgctgcaggctttccggcagcgttcgcagcatcgactgggcttccgcagttttattctgttcacgcagaacgtaatagagattctcccgggcggggccattttgcggctgctcgttgagcagcgcccgcagcgtttgttcggcctggggcaggtctttgttgtggcgcagaacgtcggcgcggaacagcttcgccgccgagccctgcgtcccgctctgctgcgccagcggcgcggagagcgccagcgcctggctaatgttgccttgcttataggcctgctgcgcctgagcaagctggccgtaaaacagcgcatcccccgcctgctgacgccgggtttcagagccctcgccgccgagatccgccgcccggcccaaatactgagaggccgcctgaaaatcgccgctgcgctgggcgatatagcccatcccggcaagcgcgtcagcgtcctgcggattggtttgcaggacctgttcaaactgctgcttcgccgcggcggtattgccgctgttcaggtcagcgtaaccctgaccgcgcgcctggccgctgcgccgttcgcggaagtagttctgcacttcgctatcctgcggatggcgctgcatccaggtatcgtaaaacggctcatctcccggctgcggccccatccacagcagcgcctgacgcagtcccgcatcggcttctttgctgccgctggccatcggctccagcatggcgatcccttcccggcgggtctcttcgcgccaggtcagcgccttgccgagggccacgcgcggcccgttctcctgcggatgctgaacgacgtactgacgcagttcgctcaacgcctgcggatagagcgatttgtcgctggccatcgtcatgtagtattccgccgccagtccggaaggcggaacgctgccgttgaacatactccgccaggtcgccagcgcggcaggcacgttgccgctgcgcgcctgctgtctggccaggttgagctgcccctgcgggacctgcgccatttttttggcgctatccagatcctgcaagccgggactgttgggcgccgctttctccagtcgcgcccgccactgggccgcggcctgcaggttgcccccctgctgcgcccacagcgccatcaggtacagcgcctgagcgttgttggcatccaccgataacactttttgcagcgattccatcgccagctcgtcgtgcgatttttcgtgccagtaattggcctgcgcaaacagcgcctgcagcgccgcatcgttacccgccgcctgcgcctcgccgaaggcgccgagcgtcagcgcgccggacaggcacagcgtggaaaattgacgggccgccttcgtattcattttactgactcttttcattggctatctcccgactccaggcgcttgcgggcatgacgtttgaacatcgcggtcagcgccagacccagaatggacgtggcgattaaccccagcaccgccagcaggccggagtgctggttggcataccacaccgccatcatgtaccacggcatctggccgctggggaacggcgtactgacctggaagctacgcacgccgttatcgctggtaatcaccgccgtatcgccgcgaataccggcattgatgcgcggtgaattaagatcgtcttccagtttcgccagctgatcgtcgctgctggccatcgccaccacgaccacccgctgcgggttccacggcgagcgatagctaataaacccgcgccaggcgctgctggaagagaaatagcgatcggcatccacgccgtcggaggcccagtcgccgctcagcctgcgctgaatttttgtccatagcgccggttcacgtacgctcagcaggttatcgaccggttgatagggagaatcggccagcaggcgctgattaaacgctttctgatcgagggcgctcaccgccaggacatctcgatcgcgcaggaacagcgcattcgcgccgtcgtcaggaacgcccagcatcacgcggttattggcaagcgctttaccggtcgaattacccgaacgggcggccagattcagcatcgtcgcgacctgcgtttccgaaggctgttccggcagcagcagcgtggtttgcgaataatccgccaaccgggagaacgggaacgacgcgccgacaaaataggaaagattcggcagcagcgagaagtgccgcgtaccgctcaaatcgatccacgagtcgtcggtgatgcggctcttaatcgtgctgttcagcaggaccgaacagggcgcgctgtccttcggcaccagattgaaatagagcgagagctggttatcgccgtaaatcagatacggcgccagcgggatagtgaaccgctcctgacgcgcgtcgccgcccaggtgacgccagagcttctccagcggaccctgtttattcatcggcaggttgttgaggaaggtgttgttgagcgtcacgctcagcagtgacctatcctcgttaatccagctctccgacgggaaacggtagccgatctgcaggggtatggtttcgccatcccacaggtagaggtccggcgcggcgcggaaggccacgcgtagcggttcatgccatacgccgctgacggtcatactttgatcctggcggatcagctcgctgatttttaccggccgatcggtggcgatccagcgcggggcatcgtacggcttgctgacggctatcgtctgcggatcaacatccatgctggccgtctgcggggcgaaatcgccgcgggtcaggcgccaggcggccatccgcagcgccgcgtcgttctggccgacgatgagcagcagcttataggccggattgccggggttctcaacgatccgcagcagcggcctgtcggtttgcggcagcgtcaggccgcccacccgatcgccggggtggccgatgataataccgtgcttctcgggcaggcgatcgcgcagcgcgtcaaaagcgataccgcgataatcggcctgaatacccagccatgacgacaccagcgccgctgcgctgaagatatccgccgttggtttctccggatacgcgatagcgatatccgccggcgtcatctgcatgctgtcgaaaaacgggcgcgggaaatggcctaaatcgttgctgatattaagctgctggctctcccagctaaagtgggaggcgggtaaaatggtcacccgcgaggtgtcgtgaatatcgagccggcactgcattgcatcgccgtcgttaatcttaaagctcaggttgttgctggagaccatcagcgccgccggaatatccagctgatagtgcgagatctcctcgccgtccgcgcccagcggcagcgtgccgagcggctggccgttgagcattaactgcagcgtggcgttgcgggacgccatctccggcgagaccttaacatccagcatcagctgggcatgggtgaccacctgatcggagggcagcgtaaagctggcgccgccctggttttgtccaccgctaaggatgataccgtccggcatgcccatctgcatgaggttcaggtctccgccgacaatcggcgttagcggcaccgtatcagcgaccccagaggcaaccggcgacggcatcgcgggtagcgaagccggctgagggacgtttgccggcgcgggctcggtcgtggcgggcgaattcgcttcgctggcaggcgccgacgcgccgctggcttccgcatcaggtagcggaaaattaagcggcggcaatgcgtcagagggcgtttcctcgctatgcagcgctggcgcagagagcataccggccagcagcgcaagcgtcgttaaacgtttcataggctgccatcctcctgcgcgggattcgccgcaggcggctgacgacgctggctacggcgcgtcttccacgtcagccagaacagttcgaatacgcagcgcaaaatggtggcaaaagagcggaacgggttgtcctgcgggcgcggcgggttaatccacgcatcggcgcgggccagcaccacgcgcaccagctcgcggcggcgggagagctgaatgttttcatcaaattgcagacgaataaactggtcgtcagcggtaacctggcgcaccgggatcgaaatcgcgccggactggagaatcagctcaatctcttcgatttcatcctgcaggtgacgcttatccggcgcgcttacgcggcagccgcccatggacaggtccgcggtgtggctgcgggagacaatgccgctggtgtagtggatcagtaccggaatatcgacatcaatacgaatcgtttttcgcacctgacgggtttcgcgcgccacggcaatggcggccagcaggaagatcaggctgtaaatcccccagccgacgttcagcgcgataacgttcgggtctgagccaaagtagtcgtgaccgatggcgcggacgataccgaccaccacccccaggcccagcagacaggcgacgaccaggtgcggtctgacgacggtaaagtcgaagtagcccacgtccagcaggccgcctttatcggtcacgttgaatttcccgcgtttggggaaaatcatggtcaccagcgtcggcagcaccaggtggaacgccagcacgatatcgtagatttcgccccagaagctgtaacgatagcgaccgttcatgcgcgagccgacatagatcgcgaggaacagatgcggcagcgcgtaggagacaatcaggctggccgaggagtagatgatattcaggttgaacagcaggtaggccagcggtgcggtgacaaagaccacccgcggcagggcgaactgataatagagcatggcgctgagatagcacaggcgctgctggaacgtcagcccacggcccagtagcgggttatccagacggaatatttgcgtcatcccgcgcgcccagcgggtacgctgaatcacgtgcaccaccagacgttcggtggctaagccggccgccagaggaatatccaggaacgccgacttccagcccaggcgctggaacttcagcgcggtatgggcatcttcggtcacggtctctaccgcaaagccgccgatctgttccagcgcggcgcggcgaatgacggcgcaggagccgcagaaaaaggtcgcgttccagttgtcgttcccctgctgaatcgggccataaaacagcatcccttcgttaggaatattgcggcccacggagaggttgcgctcaaaggggtccggagaatagaagtagtgcggcgtctgcaccagcgccagcatcggatcgttgaggaatccgcccaccgtcgcctgcaaaaagacgcgggttgccacgtgatcgcaatcaaaaacgcagataagctcgccgtgggtcaacgtcatcgcgtggttgaggttgcccgccttggcgtgtttgttatcgttacgggtgatatacccaaccccaacgtcggcggcgaataccgcgaattcattgcgcttaccgtcatccagcaaatagatttttaatttatcttttggataatcaatacactgcgcagccagcaccgtatcacgcaccacctcaagcggttcgttatagctgggaatatagatatctaccgtcggccacttgctcatatcatccggcagcgggacaatttcacgctttagcggccagaccgtttgcaggtagttaagcagcagcatcacccagatatagacttccgccagaaacagccccatccccagaatcgcttcgatggtggagttaaaatgcagggtctgcgtcagacggaaatacatatatcgggtcgacatcagcagcgatgtcaccaccatgatgacggaaacgctgcggtttttactgaaccccatcacaaagagaataccgatgctcagcaggccaaaaatatactgcttttggctgtccatcggcgtgatcaccaccagcacggcaatgggcgaaagtaccagtaccagcaaccagaaaagcgtctttttcattcagcagccctgcaattaaattaaagccctgacctgcgaggctggctatgcaccttgccgtcaccaatattgatacccaactgcgcagagatttttttggcaataatttcaatatcaaaggcggctgcggaggaggagttaaagtccaggatagacttctgggaagcattcgcttccaccacgctttcatcacgatggatgatgcccagcagacgatcgcccagcttttcttccattaacgccgtaacatcgcggctgacctggcgacggttatcgctctggttgatcacaaaatagtgtccgagtttatggttgagttcgcccccggtcagacgcagcttttccacgggcgccagcgcggacatcgaggcggtatccgccagcagcggtaccagatgcatatcggcaagcgaagtgagcgcctttagcgcgggcgaagggcccggcggcaggtcggcaatcgtaatcagtcccggataattgagtaatgccgccaggccgcgcgtcaggaaatgctcatcatggctcaggcgttcatcgaaggcctgccgctgcgcgtcgctcacgtcgccgtagggcaagacgaaaatattgctgccggcgcttaatacgcactggctccagtcatggagctccagcgctttcgcgacatagccgcgctcgtcgctgagggggacgccaaaatgcaggcgcagggcgttctgcacatcaaaatcgagggccagaactttactgcctgcgcgggccagcgcccaggccagatttgccgccagggtcgtttttcctacgccgcctttcggtgaacacacgcagatcaacggcatgtcgcaatcctctccaggagtgatttcagtgactgatctttatcttttgctaccggctccgcggttttggccgcaaaaagatgggcaaaaccctccgtcgtcggcgcggccgccggacgaggcctgactgccggagcagggacgctgaccggtaccggctgcgcagcagcctgagaaaccgccggctgggaagcgggcgtagccgctgccaggctttgcggcagcgcaggctctacggccactgcagcagtcatgtccgtcacgggggcgggctgcggcgcggagggcgggataatcagggacggtgcagccaaagagggcgccgggggagcctgaacgaccgcaggctccaccttgtgaaacatatcggcaggaacccgctgcggcagaggtaaggaaactgacccacccatggccaaagaagacgcttcctccgccggaataagttgattgagaataacccaatcccctttttcaccggcagcggcttctgatgaaaggtccttgaattttagactgtgtgtccgcgtcttttccttgaagcgctgcaaatcatcataatggttcatagataacctcatgatttaaatacgtcatatttaatctgttttaattgtcatcccacgccactaaagcgtagtttaatttgttgttttttgggcatttacccggcgttacggccgtcacaatacgctaactttagtcgcgatttgattattttggataggtcaggctggtgtaattccatagtggtagtgcggttacactaacagttctttttcaaaatgatagccccattttttgggcggctgcgccgtcaatccccccgcagcctgccaggctattagcagatcgtagttttttatactgtctgaattttaaaaaatggcgtaatacacgccaggggaaggctaaagagaatacattttaatattttttaaggcgtttagaaatcacttaccgcgcttaattaaaataataaaatagtgttcccgtccaaaataaatagctcaggatgttagctaaaaaccaggaatataaagcgttgaccgaacaacaaggaacagttttatgcatcgcttttgctgttaatttgctccggctaaagaaacaatcaagataaagtaaaatacattcatgtagttatcccggactcccgagatagcaatggttgtggcgtaaaatgccggtattgttcgttgtcggttgttccaacagtgctgagttatggttaaaaaaaaagccgaagcacaggcttcggctttgattatcgattgcctgaatcagctcaggggcttctcgccgttctgatcctggtcgaccgcaaagcaggctaccagctggccaccgtagtccttcagctgcggctgaagctgggtgcacgggccgaaacggcgacggcagcgggcgttaaacgcgcagcccggcggtggattcagcgggctcggcagctcgccggtgagcttgatgcgctcgcggcggtcatccggattcagacgcggcgttgccgacagcagcgcctgcgtgtacggatgctgcgggttgttgaagatttgatctttcgtccctttctccacgcagcggcctaaatacatcaccatcacttcatcagcgatatgctccacaaccgacagatcgtgggagataaagacgtaagaaagccccagatcctgctgtaaatccatcatcaggttcagcacctgcgcgcgcaccgaaacgtccagcgcggaaaccggttcgtcggcgatcaccacgtccgggtcaagcatcagaccgcgggcaatggcgatacgctgacgctggccgccggagaacatatgcggatagcggtcgtagtgctcggttttcaggcccactttggccatcatcgccagcgccttctcccggcgctgctctttgctcaagctggtgttgatctgcagcggctcttccagaatctgccccacctttttacgcgggttcagcgaaccgtaggggttctggaacacaatctggattttctgccggcgcagcttctgcgcctgcggatcgtgcttaagcaggtcctgtccctggtaatagagctcgccgccggtggggatttcaatcatcgtcagcagacgaccgagcgtggatttaccgcagccggactcccccactaccgccagcgttttaccgcgttcaagggtaaacgagacgccgtccagcgccttgaccaggcgttccggcgtgaagagccccttcttcaccggatagtattttttcaaatcggtggccagcaacagaggctgttgcgtggtggcctcatgcgtactcatagcccaggcctcccggcatcatcaagtgggtaatgacatttcgactggcgaccgccgttaagcaggttcagctcaggttcttcgctgcggcatttgtcggtcgcataggggcagcgcgggttgagcagacagccgctcggacggtcgtatttgcccggcaccacgcccggcagcgaggcaagacgcgctttatcctgagcgaactccggcagcgcgcgcagcagcgcctgcgtataggggtggcgaggcgcgcggaagatatcctccgcatcgccggtttccaccacctgccccgcgtacatgacgatgattttgtgcgccgcttcggccaccagcgccagatcgtgggtaatcaggatcagcgccatattctctttctgctgcagctccagcagcagctcgatgatctgcgcctggatggtcacatccagcgccgtcgtgggctcatcggcaatcagcagctttggccgacaggcgatggccatcgcgatcatcacgcgctggctcataccgccggaaagctggtgcggatagacgtcaagacgcgaagccggatcggggatccccaccagcgtcagcaggtcaatcgcccgctgcacgcgggttttcttgttgccgccctggtgcaccttaatggcttccataatctggtaaccgacggtatagcacggattcaggctggtcatcgggtcctggaagatcatcgccacttccgcgcccaccagctggcggcgctctttttcggaaatgcgcttcaggtcgcgaccgttaaactccagcttttcagccatcacccggccgggatagtcaatcagccccataatcgccagcgagctgaccgatttacccgagccggactcgccgacgataccgaccacttcgccctgatttacgctgtagcttacgcgatctacggcgcggaacggcgtcccttcgtctccgaagtgcaccgagagtttatctacatttaataacgccatctcgaacctcttactgcttcagtttgggatcgagcgcgtcacgcagaccgtcacccatcaggttaaatgccagcaccgtcagcaggatagcgacacccggaaaggtgacgacccaccaggcgctctgcgcgaactgcagcacgtcggagagcatcgtgccccactccggtgtcggcggctgcgcacccatgccaaggaagccaagagcggccatatcgagaatggcgttagagaagcccagcgacgcctgaacaatcagcggcgcaaggcagttaggaagaatgttgatgaacatctgacgcatcgcgcctgcccccgccacgcgggaagcggtcacgtagtcgcggtttacctccaccagcaccgcggcgcgggtcagacgcacgtagtgcggcagggcgacaaaggtcagcgctattgaggcattgacgatcgacggaccgaagatggccaccagcaccagcgccagcagcaggctcggcagcgccagcataatatcgacaacgcgcataatgaccgagtcaaccacgccgccaaagtagcccgagacaaggccgagcaccacgccgaggatcagcgacagtaccaccaccagacagcctaccagcagcgacaggcgcgcgccgtacatcaggcgcgacaggatatcgcggccgacgtcatcggtgccgagcaggtggctcacgctgcccccctcctgccagaacggcggagccagcagcgcatcgcggaactgatccgccggattatagggcgcgaggaagttggcgaagacggcgatgataatcatcaccacgacataggccagccccacgacggcgcctttgttgcgtttaaaatagtgccagaactcctgcagaggggtcattggcaccggcgcggcgacaactttattttcagtaatttgtgacatgatggccccttacttcttatgccggatacgcgggttcaccacgccgtacaacaggtcgaccagcaggttgacgagaataatcatcgtcgccaccagcagcaccccgccctgcaccaccggatagtcgcggcgctgcagcgcgtcaatcagccagcggccaaggcccggccaggagaagatggtttcggtcaggatggcccccgccagcagcgtaccgacctgcagaccgatcaccgtgaccaccggcagcatcgcgttacgcaacgcatgaacgatgatcacccgcatccgcgtcaggcctttcgcgcgcgcggtacggatataatcctcgcccagcacttccagcattgatgaacgggtcatacgcacgatcaccgccaggggaatcgtccccagcaccacggcgggcaggatcatatgcattaccgcatcaataaagtcgcccggctcgccccaaatcgcggtatcgatcagcataaatccggtcagcggcagggtatcgtcaaggaagacggtatcgctgatgcgcccggaaaccggcgtcaggttaagctgtaccgacaccagcatgatcagcatcatgccccaccagaagataggcatagagtagcctgtcagcgcgaggcccacggaggtgtggtcgaagatagagccgcgtttaaccgccgccagcacgcccaccgggatcccgacgatgacggcaaaaatcatcgcgcagacgcccagctccatcgtggccttaaagcgcggcacaaactcttgccaaacgggaatacggcttttcagcgagatgcccaaatcgccgtgcatcacgccccaaatatagttgacgtactgctgccacattggtttatcgaggcccatttcggccagcagctgcgcgtgacgttcaggggaaataccacgttcgcccgccataatcatcaccgggtcgccggggatcatatgaacgaaggcaaaagtgagaagggtaataccgataaatgttgggatgacaagtcccaaacgtcggagaatgaactgcaacataacccggattctctctggagacggcccgcctggtgacaggacgtctgtattgctcacaaatgtcaattccctctccccaaggcggggagaggggaaacacgctgttattattcgatagagacgttatcgaagtggtgtttacctaatggatcgaccacgtagcctttgacctctttacgcaccggctcatagacggtggagtgggcgacgatcagcgccggagcctgatcgtgcatcacgacctgagcctgcttatacagctcaatgcgtttgttgtggtcatcggtggcgcgagccggctgaatcaggtcttcaaacggcttgtagcaccagcgggagtagttagaaccgtcttttgccgccgcgcagctgaacagggtggcgaagaagttatccggatccccgttgtcgccggtccagcccatcatgacggtctgatgctcgcccgctttcgcgcgcttgaggtattcaccccactcgtaggtcacgatcttggcctggacgccgactttcgcccagtcagcctgaatcatctcagccatacggcgcgcgttcgggttatacggacgctgtaccggcatcgcccacaggtcgatggtgaagcctttttccaggcctgcttctttcagcagcgctttcgctttctctggatcgtaggtgtagtctttaacgtcgtcgttatagccccacatggtcggcgggatcaggttcttcgcggcctggcctgcgccctggtaaacggctttgataatcgcttctttgtttaccgcgtaggtcagcgcctggcgaactttgacatcatccagcggcttcttctcggtgttgaaagagaggtagccgacgttcaggcccggctgttccagcagcgtgatgtttttgtcttccttcatgcgcgcgatatctgccgggttcgggtacggcataatctggcattcgtttttctgcagcttagcgtagcgcacggaagcatcaggggtaatggagaagaccaggcgatcgattttcggcttggtgccccagtagcccgggaaggctttatagagaatgcgggagtctttctggtactgcagcagctggaacgggccggtaccgattgggttgaggtccactttctccggcgtaccggctttcagcatgttgtcggcatactcttttgacagaatagaggcgaagtccatggcgagatcggcaaggaacggcgattccggacgggtcagcacgaactggacggtgttatcgtccactttcttcacttcgctaatcaggtcaggtaatcccatcccttcaaagtattcatagctgccgccagacactttatggtacgggttattggtatttttttgtctgtcgaaggagaagacaacgtcatcggcgttcagcgtgcgggtcggtttaaaatctttattatcctgccacttcacgtctttacgcagatggaaggtataggttttcccgtcttcgctaacttcccatttttcagccaggcccggaatgacttccgtggtgccggttttaaattccaccaggcggttataaatcggcactgagctggcgtcataggtggtaccagaggtgaagagctgcgggttaaagccttccggcgaaccttctgaacaataaaccagggtcttcgcttgtacgcttgctgcgacggtcatggcaaccaggctcagaccaagcttcagcatccctgatttcttcaaggaaatactcattattctgctccaaatgtgatgttgtttgcatatatccgccagacctttatttatttttattcgtcatattgcgaactacggatgcgttggctgcgctcgataaccccggtcacatagtcatctatgctcccggagattctcacgcttgccgccttcccgcagctcgaactatttagaatatacccggtccggtcggtggtgcccgaaagcgttgagagagatggggattcctttcacaaaaacgactgagttgcagtacggattctccatgaaatgcccctcatgccctacaatctgtcaacagaatggggaaacgtcaatacagccaacctggttttacatccggtgtgagaattggcgggcaaagattaaaaaaagtgcaaagcgctatttccagcagagaaatttatgctagcggccaatagacagaataaacaccttaatattttccagcagccagtgataagcaattatggtaaatggtaaaaatttcttgcgatgtgaccaatatgtgagcgataaatagcgtgaacgttaaaacgcacagcggaaaatgctgaagttatccataagcttcgcgaaaaaagatcggagtatatataaaaaaatacaatggaagatgtcacaaaatagggaattggcgccaggaaatgagggtggaggcgttttcttacactcttagcaagcagcgtattttcccggaggcgatgctggcgcatctgtccgggctacacggcccgcagacaacgctgaacccgtagcccgggcaagacgctttgcgccgcccccgggagcggtgtgcagtacggcagcacttcccggaggcgatgctggcgcatctgtccgggctaccggcccgcagacaacgctgaacccgtagcccgggcaaggcgctttgcgccgcccccgggagcggtgtgcagtacggcagcatttcccggaggcgatgctggcgcatctgtccgggctaccggcccgtagacaacgctgaacccgtagcccgggcaaggcgctttgcgccgcccccgggagcggtgtgcggtacggctggatttcccggaggcgatgctgcgcatctgtccgggctaccggcccgcagacaacgctgaacccgtagcccgggcaaggcgctttgcgccgcccccgggagcggtgtgcagtacggctggatttcccggaaacgatgctgcatatcagtaaggacgacaaaaacaaaaaagcctgctcgttgagcaggcttttcgaatttggtcggtgatagaggataactcgccactacgtggctcgccctgcgggccgttgctgacgcaacgttctctcgctccgctcgagtcgaacctctacccccggaggttctcatcctcacaaacttcaggtgcaaaaaagcctgctcgttgagcaggcttttcgaatttggtcggtgatagaggattcgaacctccgaccccttcgtcccgaacgaagtgcgctaccaggctgcgccaatcaccgaatgcgggcgcatcttactgctgcgatacacacccgtcaatgccttattatgaaaaagtcgctcaagcggcgagaaactcgccactctgctactccttcttcgccgcagcgtcaggaacgtggcaccagttgttatattggttaatcccgccgtccggcgaagtatagccaaggcagcccataatagtgtcatacagctctacgtgacgacgcggcaccttcatggccgcctgctgcttcaggtgcgcaaaagaagctgcgtggtcgggcgacgccagatacttatccgacatccacaccagcatcggcacgcggaactgctccggcggcgccatcttgcgcggcgtaccgtgcaggtgttcgcgctcgttgatagactcgccgtggtcggccgcatagaaaacaatcgccttcttgtcccgcagctgatccagcacgctgacgataaagtgatcgacgtaggtcacgctgttatcgtacgagttaatcagctcagccttcgagcatttattatcgacgccgacgcactccggcttccactgcgcaaagctgcgcggatagcgctgggtatagttaaagtgcgatcctttggtatgcagaatgatcaggtgcttaccattgggattcttcgccagaccgcgcttcatttcatccaccagcagcatatcgtctacgctcttgccgcggttactcggctcagcgccaatctgctcgcgataggcgatattgttcgccatcgtgttgctatagaaccacatctcgctctgcatggcgtacaggttgccgctaaagccgagctggtgcaggacggcaaagacgttctgttctttcagcgtccgctgcgggttatcatccgccccgccctgacgaacgaacatacagcgcagcgacagcttagtagcggtatcgcaggagtatccgcggaaagcgaccaggtttttctcctgcgccagcttaggcgtggtattgcggctatagcccaggatgcccatatggtcccagcgggtggtttcgccgatgataaacaccacgtaagtatcatccagcccttgcggctcaacgtaggtgaattttttcgccggattgatcagggatttattatcggaagactcgtccacctgcgcccacgcgtaaagccccagcgctgatagccagttagacggcagataggagttagccaccaccccgccatagcttggcagatcgacttcggaactgcgctcaaagttcttctgacgaacctccagcaagcgaataggcccccagaccatcaggccagccagcagcacgatagtaatattcttcatccgctggccgggcgtacgaatttgacgcagcagggtgaagcgacagcggttgctccagataagcaccagcggcagcgcgctcatcagcaccagccagagaatcaggtgccagccgataacctctctggacaagtcgatgtcagtggtcatcaccgaggcaataatcccgtagccgatcaccacgttcaggaaggtcatgtaatagctggcggcggcggagaagagtacgacgatggtcgcgagaatacgccagacccggcggccaaacagcgacaaaatacgcagcagaaagaaggtgaccagaaaggtccctatcagctcaactgcacctgagagtcctttccagatggtaaactcctgagcgtacccctcgaagcggcggaagaatacggcagcgttcataaaccagccgatgtacagcgccagccagatactgagcttcagctgcgtcatcgttttaatgtatttcatgcaaaaaacctggaaaacgaagagataaaaccgcccgacttaagcgatataagtaagcaggttaataaagtgcgtttagcttggttataagaaacctctacaaagcgcgataagtagaccacagcggaaggaaaaagtatcaggagggaatgtgatccaaccaaacatttacaaaacatttggttggattggcactattagcttaggtaattaatcatcggggccgggataacacccggtttcaggcatgagcctggtggtaaatttcacttttcggctgacgaatcgttgtcgaaagcgccagagagagaatcagcagcgcaaagatgacgcagaaggtcacgtagaaaccgccgaacagggaagcaatcagcgaaccgcagatgctgccgataccaaagccgagataaatcacgccgtagtttttcgccaggttattgaggccaaagaactcgctgaccagcgacgggaagacggtaatcgtaccgccgaagttaaaggccacgcaggcgatagcggcgaagaacgtcatggcgttcagcggagcgaacagcagcgccgccataccgataagcgagacaacctgtccgatggtaatcacccggatgcgggacattttatcggacagaatgcccagaaccaggcgcccgctcaggttagcgatagagatcaccgtcaccgcgttggcggccgtcgcaacatcgagatgcaccatcccctgggcgatatctttcgccacgccaatcacgtacaggccgctcatgcaggcggtcaggaacatcaccgccagcatccagtactgaggtttacgcatcgattcggcgagggtgaagtcattttcgacgacgccgttgttggcggtagcggtgtggttcggcgcgtctgtcatcagcgtcgcgccaaaaacgatcatcaccagcacgatagcgccccagataataaaggttttttccaggccgaccgtcgccagcagatgggagtcaataaatttaaaacccaggctgccaagcccgtaagcaccgatggaaaaagccgaaatcagtcccttacgttccgggaaccatttgacgcagttcgacagcgtcagcaaatagccagcaccgtcggccagcccaaccagcagacccgcgctcagccacagcatcatcaggctgtttgaatgcgcggtaaggaagaacccgaggcccagcaggacgccggaagccatggtgacgcgtttaacgccgaaacgttcctgtaatttaccggccacggatgaagagagcgccaggccgaggcttaacaggccgaatgaaaacgccacctggcttaccggttcgtccagcttggcggaaagcgaactattgaacaaactccatgtataaaccgatcccagcgcaaattgcgtaatgatagtgccgagcagcgtaagccagcgggtgtattgacggtttgcagcgttcatagcagttgtcctgaataattaactgccgccaccataacgaagtcccctgtaagtctggggaaaaaaggcatgagctgccgctaccgcggaatgaaatgcattaaaggcggaatgaatggcattgcaaaacattcacgccttaacgatttatcgaaaagttagtgaccgctaccgctggaatatgcgtcattactgtaatgataaagtaaattaaacgtatcaactatgctacatatttagcctgaataactcgagtggcaaatggcggcatgccgcagccccatccgggtgaggctcagggatgagccgaatcacaagcgccgccagcgtatccgcaataaattaaaaattggcgctcacgcccattaaataaagatagtttgccccggtgggtaaattgtccgcctgggatagcgccgcccaggcggcaagatgagagttgagcgacatatctgcgcccagcgtcacgtcacgccaggcaccgtcctgcgcgcggttcgccccgccgaaatccgtcgtcaactcctggttatagctcacctgagcccacggatgtacgccccatagcttctgataatcgacccgccagcccagcgtattcacgtagccggttccggccgcattgcgggtaagcggcggcgacgtcagatcggaatgtaaactggcgaccgggccggacgtcatcccctcggtcagagagaaattccagccgacgctcataccgcgtgcgctatccaccggagagaccgcctgattaaacgccagtccggaaggatcgtcggacgcatttatccgctccgcgagaatatcttcatagcgcggttggtgatcgctgtcccatgtatagcgttccgcagtattactttttgtatcgatagcgatatattcctgttgccaggcattcgccccggcaacacacgacgcccagacggatacgcacgccgggaccaggaatacccggaggccattgcatttctttattatcattaatgcgactccaaaaagagccgaaacggcaaggttgctgtgtttttttttatgggtgtcctatccctgcttggggaataataaccctgtattaactattatctttatctttcagccgtcaagttgaacgactgagtttttatcacaaaagggagagacagatgcaacgttgcggatgggtcagtcaggatcctttatacattgagtaccacgataaggagtggggcgttgctcaaaagaatccccgcaagctgtttgagatgatttgtctcgaaggccagcaggccggactgtcgtggatcaccgtgctgaaaaagcgtgaaaactaccgccgcgcttttcaccagtttgatccggttcgcgtcgcggcaatggacgaagaagacattgaacgtctggttctcgacgccggtattattcgccatcgcggtaaaattcaggccatcatcggcaacgcccgcgccttcctggcgatggaaaaaaatggcgaacctttcgcagatttcgtctggtcattcgtcgataatcacccccaggtgacggccgccgccacgctggcggagatcccgacaaccaccccggcttctgacgcattgtcgaaagcgctgaaaaaacggggctttaagtttgtcggctccactatctgctactcctttatgcaggcctgcggtctggtcaacgaccacgtcatcgactgtttctgtcgctcaggaggccaggatgattcgtaactgggacgctaacgaaaccggcccgctgctcgagctgtggcttgagagtacgatccacgcgcatccgtttatcgccgaaagctactggcatgacagcctggcgatagtgcgcgacgtttacctgccctccgcgcaaacctgggtatgggagcaggacggcgtgctgaagggttttatcagcgtgatggagtcacgcttcatcggcgcgctgttcgtcgcgccggatgccgccaggcagggtatcggcagcgcgctgatcggcgaagtcaaaaaacactacggttggctaacccttgaggtataccagaaaaacgttcaggcggtgaatttctaccatgcgcagggcttccgcattgaagactgcgcatggcaggatgaaacccagcatccgacctggattatgcattggtcggcggatcaaatgccgtcagcgtaagctcgggcccggtatacttttccagccaggccagcgccgtatttccggcgcagccgttacccagccgcgatgtcggaatatctttggtcagcacgttcaccgcaccgtttttgcagatccccacctgagggtcgagatcgggccatgctccttcgtgcaagcagataaccccgggacgaatgccgtcggtcactaccgcgccggccagtacctggccgcgtgaattccatacccgcaccagatcgccatcggcgatattgcgcgcctgcgcatcgcgcggatgaagggttaacggttcacggcccgccaccgcgtactgttcgcgcagcggcgtatggttgagctggctgtggaggcggtgcgccggatgcgctgacagcacctggagctggccttcctgcgcattgccgtgccattcgtccggctccagccacatcgggtgcggcgggcaatccggataagcaaacccggcgatggtcggcgagtgtatctcaattttaccgctggcggttttcagcggattcgcctgcggatcggccctgaaggcggcaaagcgggcgaagcgcgcgttttcagggttctccggcatttcaatcagctgattatcctgccagaaccgggcgaacggcggcagcgtaacctgctgcgccgccccgcgctgggcggcaatctggtaaaacgtctccagccactgcagatcgtttttaccctcggtgaagcgctcccgcccgcccgcttcccagcgctcgctgaggtcggcgaagacctcgaaatcatcgcgcgcttcatcgcgcggcgcgaccacccgcttcatcggcaccagatgctggttgctgtagtcgccggtcatggtcatatcgttgcgttcaaatgaggtcgtcgcgggcagcacgatatcggcatggcgcgccgcggcggtccagaagcattcggaaatgacgataagctccggtttttgccaggcgcggatcagtcggttggtatcctgatggtgggtaaagttggcgccgcccgcccaccagataaagcggatatccgggaaacggcgttccataccgttatgttgataagacgctccggggttttccagcgcttcaacgatacgcgcgaccgggattttttccactgcatcggtcccgcccgccacgctgccctgcattgaggccagcaccgccgcgcggcgcgtagggttgccgccgttggcaaagtgataggaaaggccaaagcccccgccctgggtgcctatctggccgagcatggcggcaagggtcaccagcatccagtgtttttgttcgccaaactgctggcgctgcattccccagccggacatcaacatggtggtgttttcgtggaaaagttgtgccagttcgcgaattttctccgcgctaatgccgcagatcgccgccgcccattccgccgtttttgccgttccgtcgctctccccggtcagatagcgggcgaaaacgtcatagccgctggtgcagtgggccaaaaacgcgtcatcctgccagccgttttccaccagcgtatgggcgataccgagcatcagcgccacgtcggtgcccatatgcggggcgatccactccgccgcgtcgccaaagaattccgccgtttccgatcgcatgggatcgatgcagatcacccgcttcccgctctgacgcagacgatcgaaccacgggatgccctgctcatcggaagcgttccaggcaatttttagcgtatttaatgggttagcgctccacagcaccacgacatcgctatgttccaacaccattggccagctggtctgctgctgataaacctcattaccgccaaccacgtacggcatgatcgcctgggccgcgccggtggaataatcgcccagatgcccggtatagccgcccgccaggctcatatagcgctggagcagcgtcgccgctttgtgcagcacgccatttgagcgccagccgtaggagcccgcaaaaatcgacgccgggccgtagctttcgcgaatgcgccggtgctgggcgtgaatcagatccagcgcctgctcccagctcacccgcacaaactcatcctgcccgcgcacgccttgtgggctttctggcgaggcgagaaatcccttacgcaccatcggataacgtacgcgggttttgctatgcacctgatcgcgcactgcggtttgcagcgagttggggaaaggggtatcaagcgccccgcgcgaagagatgacgttctcgccatcggtttcgaccagcattggcccccaatgggctgcggtcaggatagttttggtagcagatgaggttggcaatgcgggctcctggtcagcgatagcaggtgtggtgacggcacgttattcagccgttcaatgttatttacaaattgagatgctctctgcggaattttctccggtttcgggcgtcataatcaaccgtcacggtcgctgtggcaaagaataaaaaggattaaggaaataagatgaaaaaacgcgtactcatgattgcggctgtcgttagcggcgcactggccatttctggctgtaccaccaatccctataccggggagcgcgaagcgggtaaatccgggatcggcgcgggcattggttcgttagtcggcgcaggcgttggggcgctctcctcttccaaacatgaccgcggcaaaggcgcgctgatcggcgcagcggccggcgcggcgctgggcggcggtatcggttactatatggacgtgcaggaagcgaagctgcgcgagaaaatgcagggaaccggcgtaagcgtgacgcgaaacggcgacaatatcgtgctgaacatgccgaacaatgtgactttcgacagcagcagcgccaacctgaaacccgcgggcgccaataccctcaccggcgtggcgatggtgctgaaagagtatgagaaaaccgccgttaacgtagtgggttataccgacagcaccggcagccaggatctgaacatgcgcctctctcagcagcgcgcggagagcgtcgccagcgcgcttattacccagggcgtggcggctaatcgcatccgcacaaccggtatgggcccggcaaacccgatcgccagcaacagcacggcggaaggcaaagcgcagaaccgccgcgttgaaattaccctcagcccgctgcagtaatgccctctttgcccggcgactcgccgggcaaaatgcttgatatagcgaattttcgcgctaaggtgtgtgcagatttcagcaaaggaagccaccatggcgaaagcggcgcgagcaaccattagcgatgtggcgaaagccgcaaagaccggcaaaaccagcatttcacgctatctgaacggcgagaagcatctgctttccgacgatctgctggggcgcattgaaaaagccattgccgagctcgactatcgtcccagcctgatggcccgcggcctgaagcatggccgcacccggctgatcggcctgatcatcgccgatatcaccaacccctactccgtcaacgtgctcagcggcattgaagccgcctgtcgcgaaaaaggatttaccctgctggtatgtaataccaacaatgagctggaccaggagctgcactatctcgacctgctgcgcagctatcaggtggaggggatcgtggtcaacgcggtcgggatgcgcgaggacggcctcaaccgcctgcagcagtcggcgctgccgatggtgcttatcgaccgcaaaattccggaattcgcctgcgatgtcgtcggcctcgataatacccaggccgccaccaccgccaccgaacacctggtggaaaagggcttcgaagccctgctgttccttagcgaacccctcggctcggtcaatacccgccgcgagcgcctgagcgcgtttcgccagaccctcctgcgccataccggtattgtcgcggaaaacgccgaagtaccgttgaacgatggcgcgatgctggataacgtcctgcgccacttccactcccaccatcgcggcatgcgcaaggcggtgatttccgccaacggcgcgctgaccctgcaagtggcgcgctcccttaaacgcgttggcctgatttggggcagcgatatcggcctgctgggcttcgatgaactggagtgggccgagctggcgggcgtggggatcaccacgctcaaacagccgacctggcagattggcttcgccgccgtcgagcaggtggtgcgtcggattgaaggcagcaacgacccggtctgcgaacgggtgttttccggcgaactgatcgtcagaggctccacctcccgctaacgatccttcgtgatggcgatcataaattagacatcctggcctttgctttggaaccgataccatctagcgtaataaacaacgcatcagattatcgtcgggagtattgggatggccagaaagattattgtcgttaccgccgcgtacgggaatgaccatgttaaagcgctgggcgggcagtccgccgtcctgccgtttatcgccggctccggcgccgacggcgtagagatccgccgggaactgttcagcgcggatgagctgaaccgcctgccggaactggccgccgatattgagcgccgcggcctgctggtttgctattccgcgccggaagccctgtttaccgcagacggctcgctcaacccgcgcctcgccgactttttgcaggaagcgcaaacccttaacgcattgtggctgaagctctcgctgggccgctttacccaccaaaacgatctggacaccctgcgcgatatcctgcgcgagagcggcatggcgctggtggtggaaaacgatcaaaccgactgcggccagctggcgccgatgcagcgcttcaaggccgcctgtcgggttaaccagctgccgatcaccctcacctttgatatgggcaactggctgtgggttggcgactcgccggaagatgccgcgcgccacctggcgcctgccgtcagctatattcatgtaaaggcggctgagccgcaccattcgcagtttcgcgccgtaccgccggatgaagcgtccgggcgctggctggcgctgctcgacaatctgcccgcagacgccccgcgcgggatcgaatttccgctgactggccatgacctgacggccgtgacccgccgctacgtcaacctgttacgcgaggattaagttatgcaaaaagcgttagatgtcatcacgataggcgaagccatggcgatgtttgtcgccaccgaaaccggcgaactggctgaagtagaacattttatgaagcgcgtggcgggcgcggaactgaacgtcgcgaccgggctggcccgcctcggcttaagcgtcggctgggtaagccgcgtcggcgcggacagctttggccgcttcgtcctcaccgcgctgacgaaagaggggatcgacgcccgcggcgtgagcaccgatggccgctacgctaccggctttcagctgaaatctaaagtcgaaaatggaaccgatcccatcgtggaatattttcgcaaaggctctgccgccagccatctgtcgccggatgattttaacgaatcatacttcgccagcgcccgtcacctgcacttaagcggcgtagccgccgcgctgtcggaaagctcatacgccctgctggaccgcgcggcgcgtaccatgaaagcgcagggaaaaacgatttcgttcgaccccaacctgcggcccacgctgtggaaaagcgaagccgagatggtcgagaagcttaaccgccttgcgtttcaggccgactgggttctgccagggttgaaagaaggcatgattctgaccggccagcaaacgccggaagccattgcggacttttatctcagccacggcgttcgcgcggtcatcataaaaaccggctccgacggcgcctggtataaaaccgccgacggcgaacagggggccgttgcggcgataaaagtggataacgtcgtcgataccgttggcgccggcgatggctttgccgtcggggtgattagcgccctgctggaaggaaaaccgctgccgcaggcggtgaaacgcggaaacaaaatcggctcactggccattcaggtccagggcgatagcgaaggcttacccacgcgtgaggcgctgggcgagtaagcagattcagcacaacgtcaggccgttctgtaccctacatgcagcgcggcgtaacggatcttttctatgatgagcgtcacctcactcacagaggcaaacctatgaatagttcgacgaatgcaacaaaacgctggtggtacatcatgcctatcgtgtttatcacgtatagcctggcatatctcgaccgcgctaacttcagcttcgcttcggcggccggtattactgaagatctggggatcaccaaaggtatctcctccctgctgggggcgctgttcttcctcggctacttcttctttcagatccccggcgcgatttacgccgaacgccgcagcgtacgcaaactcatttttatctgcctgatcctgtggggcgcctgcgcctcgctgaccgggatggtgcacaatattcccgcgctggcggcgattcgctttattctcggcgtcgtcgaggccgcggtcatgccggcgatgctgatttacatcagcaactggtttactaaatctgaacgctctcgcgccaataccttcctgatcctcggcaacccggtgacggtgctgtggatgtcggtggtgtccggttacctgattcaggccttcggctggcgggaaatgtttattatcgaaggcgttccggcggtgatttgggccttctgctggtgggtgctggtaaaagacaaaccttcgcaggtcaactggctggcggaaagcgaaaaagccgcgttgcaggagcagctggagcgtgaacagcagggaatcaaaccggtgcgcaactacggcgaagccttccgctcgcgcaacgttgtcctgctgtgcatgcagtatttcgcctggagcatcggggtttacggtttcgttctgtggctgccgtcaattatccgcagcggcggcgagaatatgggcatggtcgaggtcggctggctctcatccgttccctatctggcggcgaccatcgcgatgatcgtggtctcctgggcctccgataaaatgcagaaccgcaagctgtttgtctggccgctgctgctgattgccgccttcgcctttattggttcctgggccgttggcgccaaccatttctgggtctcttataccctgctggtgattgccggcgcggcgatgtacgccccctacggaccgttcttcgccatcattcctgagatgctgccgcgcaacgtcgccggaggcgccatggccctgattaacagcatgggcgcgctgggttcgttcttcggctcatggtttgtcggttacctgaacggcaccaccggcagccccgcagcctcgtacattttcatgggagtggcgcttttcgtctcggtatggcttactttgattgttaagcctgctaataatcaaaaacttccgctcggcgcacgtcacgcctgaaaccttaacgcaacggagaaccgcatgaagccgtcagtcattctctacaaaacgcttcccgacgacctgcaacagcgtctggaacaacactttaccgtcacccaggtgaaaaacctgcgtccggagaccgtttcacagcacgccgacgcgttcgctgaagcggtaggtctgctgggttccagcgaaaaagtcgataccgcgttactggagaaaatgcccaagcttcgtgcgacctcgaccatctccgtcggctatgacaacttcgacgtcgatgcgctgaatgcgcgtaaagtgctgctgatgcacaccccgacggtactgaccgagaccgtcgccgataccgtgatggcgctggtattgagcaccgcgcgtcgggtggttgaggtggctaaccgcgtgaaggccggcgagtggaccaaaagcatcggtccggactggtttggcaacgatgtgcaccataaaaccctcggtatcgtcgggatggggcgtatcgggatggcgcttgcccagcgcgcccacgcgggctttggtatgccgatcctctacaacgcccgccgccagcaccctcaggcagaggagcgctttaacgcccgctactgcgatctcgataccctgctggaggaagcggattttgtctgtctgatcctgccgctgaccgatgagactcatcatctgttcggcaaagcgcagtttgccaaaatgaagccctcggccatctttattaacgccgggcgcggcccggtggtggatgagaaggcgctgattgccgcactgcaggaaggtgaaattcatgccgccggcctcgacgttttcgaacaagagccgctggcgaaagactccccgctgctgaatatgccaaacgtggtcgccgtgccgcatattggctcggccacgcatgaaacccgctataacatggcggcctgcgcggtggataatctgattgatgccctgaacggcaacgttgagaagaactgcgtgaatccgcaggtgaagtgagaagtgaaaaaagaaaacccgggctaaggtgaagccttgcccgggctgtcagagccgttaacgcgtcgcgttaactgccgcggtccacgcctgattaaaggcctggtgctgggcggccagcggcccaatcagcgtattgtactgactggcctgctgcgaagtcgggaactgaataccgttcgccacgaagctgacctgggtttcttgctgagcgataaaatcacccacctgcaccagctgttgggtaaatacctgcgctgccggaattaacggctgtagcgcattcgccggcgccgtcacgactttgttatagacctggtcgaaaaccggcttgagatcgtcgccctgtttcagcgcgccgtgggcggcatccgcctgtatttttgcgttctccagctgctggctcagtacgcccaaagcgccgtttgcctgacgcagcggctcgcgctgggtaacataatcctgcggtacgcggatcgcgttcacgctatcaaccaccggacgcaaacccgcatccatcgcctggcttacctgctgtgaatagccgtaaatcaccgcgtaatcggaaacgaaaggtccgaactgttttttctgatcggcggtcagcgtcggcagacgttcgccgctacgcattgccgtattttgcaggaagtcgataaacgctttgcgctgatcgccttctttatcaaaacacccactcaggctaaccaccattaacagggccgcaatagccgcaaaccagcgagagcaggactttcctgtcgccatttttttactcctttcagccaaaaaaagcgcaaacagacacacacgtgccagacgctgacaaggatagtccaggtcggccttgcaggataccttttcctgacaatcttcctccctgaaagccggttttttagcgttttagcggccagtcgcgtcggctgttaagttcatcacaattaccgctatcatccggtattcggctgaaacgcttaacaaattgattttgttattattaatctattctctcttctgcacgggtcgcaaagtggacgataatcgcacgcttcccttttcgcctgcattgcctgaaccgccgttcgatgattttattaaatgagcgattaacggctttttgttcgataatcgcacaaacaacatcaacgaccgcgagggagataacaataatctatctctgtcccccgctctgcctgccaggaatgccgcatgaagaaaacaaccatcgatattcaggcttttatcaatgaacatcccttcacgaaataccagtggatgattctggccttatgttttatcaccgtcgcgatggacggattcgataccgcgataatcggctttatcgcctctgacctggtgcaggaatggggcgtcgaaaaatcggcgttaggcccggttatgagcgccgccttagtcgggctcgcggtcggcgcgctgaccgccggaccgctcgccgaccgcgttgggcggaaaaaagttctgattatgtccatcgtggttttcggtggcttcagcctgctgaccgcctttgctaccagccttaaccagctgacgctgctgcgttttcttaccggccttgggctgggcgccgccatgccgaacgccgcgacgctgatgagcgaatacgcccccgagcggcgtagggcgctgatggttaacctgatgttcgtcggctttccgatgggctcctcgctgggcggcttcctctccgcctggatgatcccccattacggctggcaaagcgtgctggtgcttggcggcgtgatgccgctgctgctggcggtagtgctgatctttcttctgccggaatccgcgcgctatatggtggttaaacgccagcctgcccagcgtatcgccgcgatcctgcgccgcatcgcgcctgttcccgagcaggcggaatttgaactacgcgaagcgggccaggtaaaggagaaatcgtccatcggcgtgattttctcaccgcgctacgccgtcggcaccgtcatgctgtgcctgacctactttatgggcctgctgatcttctatttgctgaccagctggctgccgctgctcatccgcgaaaccggcgcgacgatgagccaggcctctattatcaccgcgctgttcccgctgggtggcgggattggcgtgcttatcctcggcgcgctgatggataagttcaacccaaacaaagtggtggccgtgggctggctgctgaccggcatgttcgtttgtctggttggtttctcgacccataacctgctgctgatggggataatggtatttatcgccggcagcattatgaacggcgcgcaatcatcaatgcctgcgctggccgccggtttctatcccacccagggacgcgcgaccggcgtggcctggatgttagggattggtcgctttggcggcattctcggcgcctttagcggcgcgttcctgatgcaggcccagctctctttcgaaacgattttctccttgctggcaatcccggccttcctgtcggccaccgcgctgctggtcaaatataagcttggccaacggcaacctccggcggcccagggtgaagtggagaagctccaaaaggcgtaatataccggccagcgggcgcgcgctggccttttccgcttttcttcttatctgtttacaataatttgcttatcggctctctctattacttttcagcatgttatatcgtccgacgcggcgcgaaagaacctcgggtgataaataattatcagggtaagcattcctggcctttttttccgactattcttaagaggctctacataattcaccctccgccgtatgaaagagaggagttctcaatggaatataaagatcctgcatttgaactgctgagcaaccttgaacaaattatttttaaagatcaggctcaggcggcctcgctgacgcgtaagcccgccgcatgcattgaatttgaccagctacgcaaaggtaccgggctgaaaatagatgattttgccaacgccatgggcgtcagcgtagcaatggtacaagagtgggaatcgagacgcgtaaggccttctcccacagagcttaagctgatgcgcctgatccaggcgaatccgcagctttcaagacagcttattgattcataattttagcgtttatgggtttcggctagcggtcctgccaaaggaccgttttcatgccaacgaaaaaaaagtttgctatcacaacgtgaacatgcgttaatgctcgcaggtttgaagtaaagaccacagagcattcgaatagagcagtccttcaaaggttatccgttgataccccggtagtgaactttccctttatcgctttaaatctgtagtccagaccgtaacgccgcaaggctcatttatttttttaaaggtaattcactatgtccggtaaaatgactggtatcgtaaaatggttcaacgctgacaaaggctttggcttcatcactcctgacgatggttctaaagacgtgttcgtacacttctctgctatccagaacgaaggctacaaatctctggacgaaggtcagaaagtttccttcaccatcgaaagcggcgctaaaggcccggcagctggcaacgtaaccagcctgtaagcttaaaaagctcaaaattattaagtccctgccaaacggcggggattttttatttgcgccttaagtcaccgccatccatcgatggcggttttttgcatttatagcctctcaacgctccagccctcttcccgccatgccaggcaatgggtcagcttcagcgcccgtaaaaaggcttcatcatgcgacaccaccagcatcgcgccgggaaactgtgccagcgctttttcaatcgccagagtggacgccaggtcaagatggttagtgggctcatccaacagcagcagctgcgtagcctcccgtcgccagagcacgcaggccagcgccgcttttaatctttcgcctccgctcagaaccgatagcggtagatggactttgtccgcccccagctgtagctgcgccagctggctgcgcagcacaccttcttctaagggcgtatcaccgagattcaggtgcgccatgatggacaatgacaggtccagctggctcagatgctgatccagatacgccgcgttgaccgataagcggcagcttcctgagagcggcggctgcaggcccagcagcgttttaagcaacgttgttttaccgcagccgttggggccacgcagcgccacgcgcatcggcccatctatacgccagtccagcgctgccatcggtgaatgggtcagccgcagcgcgtccagctccagcacctgctttcccgcagcgacctggctaccgggcagagtaaacatcaccgggttgtcttcctctacccgctcacgcgcctgctctatcgcatcgttgaggatgctgctttgttcacgatgctggcgcttaagggtgccgggacgctcttttgccgcccctttccaggcaacacgctcaaatgaagcgatattgagcgtgtcgatagtgcgcaacgtctgcgccgagcggcgccggcaggcatcgtgctctttttgcatccgcgcccgggttcgtcgccgttcagtaaccgcatgctccagcgcggcgcgagccgcctgctgctccagctcacgctgctgctgataatccgcataatttccgccgtagctgcgcaaagccgcagatgccagctcgaggatgcgcggcatttgggtcagtagctcccgatcgtggctggcgatcaacgcccctccgcgccattgctcaagctgctgatatagccacgcgcggccttgtcggtcgagatggttggtgggttcgtcaagcaggaggaaatccgcgtcggacaggaacgctccgcacagctgcgccttcactctttccccgccgctcagcgaagaggcgagccgtccgggggaaaattctcctaagccagcggcctggaatcctgcattcaggcgctccgggagatcccaaaagccatcaagtcgttcaagatcgtcggctcgcccttcgccccgttcaagacgagccagagcagaaaaaacgaattcgacaccaagccattccgccagcgtcgtatcaggaaacatgacatgctgctgagcaacgtagctcaccgaagccacacgttcgatatggccgctcgacggcgagtccaggcccgccagcaaacgcaataatcgggttttaccgacgccattgcgcccgacaagcccgcagagggtgccttccagcgataaattcagcggaccaaaaagcgtatctcccgtcgctaactgacaggtgacctgatgcaaaagaaaagagggggaccgggcacaatgagccataagcactcctgaatgaaatcaatacctcccctgctcgcaaatagcgcgaagcaaggcgtgaaattcatcagtcgtgtttgttcatttggcgcgtgctctccggtgagacgagggattcgtcgggccataggatagccataccccggtatacatttcaagcctgttttttcgacaggccgtgaatccggaaaaaaagcctcctggtttcaggaggcgaaataaatgatttcatgaaaaaaacagggtgctataagaatgcttaacgccgtaagaatggcggagatcgctctccgccaccgtctcttacgttttaatcccacaggctaagaacgccaccagctcaatattcccctgcctgagctgtaattcacacagcgaatcacgcaccatccaggtaaataataaaatagtgaagcaaatcactattaagctaaacaacagatacttttgcggcattcctcgcctcccgtgttgattttcaacaggtaagaggctactcttatggtgttcatgcataggggagcctcactttgatttatcatcaggtggggcttttctctgtttgtctcccgctgaacgcctgagacaaacagtctcaagcacccgtcagcattctaccgtaaatatctgaccagactacgttggcatattcctaaaataattcccggcaatcaatgaaaataacgaaaatatcaatcagcgaattattaatggttcacttacttatatttttagtataaaaaaacctgcccgcaggcaggttttttattattacccattcacttactgcagcagggaaatatccgctacctgcaggaacagatcgcgcagcttggacagcagcgtcagtcggtttacgcgcacatcctggtcttctgcgttcaccatcacgttctcgaagaactcatccaccggctcgcgcagggacgccagctcaatcagcgcatcctggtaacgcccttcggcgaagtacggctgcagcttatcgcgcagcacgactaaattgcctgccagcttgatttcagccgcttctttcagtacggaggcgtgaacgatatcgttcagcgtcacgtctgatttcgccagaatgttggatacacgcttgttcgccgccgccagggcggaggactcttcgagggtacggaagtgggaaaccgccttcatacgcgcatcgaagtctgccggacgggttggacgacgcgccagtaccgcctgaatcgtgtcgacggtatagccttcatcctgataccaggcgcggaagcgtcccagcatgaagtcgataacatcgtcgaccacgttgccattcgtcagcttgtcgccgtacagacgcaccgcttcttcagtcagcgtttgcagatccagattcaggttcttctcaacgatgatacgcagcacgcccagcgcggcacgacgcagcgcaaacgggtctttatcgcctttcggatgctgaccgataccgaagatacccgccagggtgtccatcttatcggcaatcgccacggcgcaggccaccgggttagacggcaggtcatcgccggcaaaacgcggctgatactgctcgttcagggcaacggcaacgtcttccgcttcgccatcatggcgcgcgtagtgcatccccatcacgccctgcgtgtcggtgaactcgaagaccatgttggtcatcagatcgcacttggagagcaggcccgcgcgggtagcatgattgacgtccgcgccaatctgctcagcgatccagccggccagcgcctgaatacgatcggtcttatcgcgcagcgtacccagctgctgctggaacagcacggtttgcagacgcggaaggttatcttccagacgttttttacggtcggtattgaagaagaactcagcgtccgccagacgcggacgcaccactttttcgttaccggaaataatctgggtcggatctttcgattcgatgttagcgacgaagataaaattcggcagcagcttgcccgcgttgtcgtaaaccgggaagtacttctggtcccctttcatggtgtaaaccagcgcttcggcaggcaccgcaaggaatttttcttcgaacttcgcggtgaggaccaccggccattcaaccagtgaagtcacctcttccagcaggctttcgctcagatcggcgttgccgccaattttacgcgccgcttcttccgcatccgctttgattgtggctttacgctgttcgtaatcggcgatgactttaccgcgctccagcaggatctgcggatactgatcggcattatcgatagtgaactccgcctcacccataaagcggtggccgcgaataacgcgatcggactgcacgcccagaatggtggccgggattactttgtcgcccagcagcagggtcacggtatgaaccggacgcacgaagtggacgtcggacgcgccccagcgcatcagtttcgggatcggcagcttcgccagcgaggtcgcgatcatgttcggcagcagcgcttcggtgctctcgcctttcacgtgggcacgatacagcagccattcgcctttatcggtcgtcagacgttcagcctgatcgacggtgataccgcagccgcgcgcccagccttcggccgctttgctcgggtggccgctggcgtcaaacgcctgggcaatcgccgggccgcgtttttcaacttcacggtctgcctgcgcagccgccagattcgccaccttcagcgccagacggcgcggtgcggcaaaccattcaactttaccgtgcgcgaggccagcgttatccagctctgcggtcacgttcgcagcaaaggattcagccaggctgcgcagtgcttttggtggcagctcttcagtgccgatttccaccaggaaagttttctcagacatggccgcctcttatttattcttgttgcacatcgggaagcccagggcttcacgggaagcatagtaagcttcagccactgctttggtcagggtgcgaatgcgcaggatatagcgctgacgctcggtgacggagatggctttacgcgcgtccagcaggttaaagctatgggcggctttcagaatgcgctcgtaggcaggcagcggcagcgggttttccagcgccagcagctgctgggcttctttctcatactgctcgaagcaggagaacaggaagtccacatcggcatattcgaagttataggtggattgctccacttcgttctgatggaacacgtcgccgtaggtcgttttacccagcgggccatcgctccagaccagatcgtaaacgctgtcgacaccctggatatacatcgccagacgttccagaccgtaggtgatctcgccggtgaccggcttacactccagaccgccaacctgctggaagtaggtgaactgcgtgacttccataccgttcagccacacttcccaacccagaccccaggcgcccagcgtcgggttttcccagttgtcttcgacgaagcgaatgtcgtggatggtcggatccatacccagctctttcagagacccaaggtacagctcctggatattatccggagagggttttatcaccacctggaactgatagtagtgctgtaaacggttcgggttttcaccgtagcgaccatcggtcggacggcgggaaggctgcacgtaggcggtcgccatcggctcgggacccaatgcgcgtaagcaggtcatcgggtgagaggtgcctgcgccgacttccatgtccagtggttgaacaatggtgcagccctggcgagcccagtaatcctgtaaggtcaggatcaggccctggaaggtcctggtatcaaacttttgcatatgatttcgtgctggatacgtgtggatttaaaggaaggagccagtatacccgctggctgcgagatatacagtatgaaacgggattgtttagggaaaattgcggaaataagcgccaccgtgggcgcgtttagcgcatggaaagatgcaaaaactgtccgtccgggtcaaaagaacagataaaacgttcattccgcgcagtcttgcccgaaagctcgtagctcccctgaaactgctcgaaatggctgatgtcaacctggcgcacgcctgtactataacgaacggcggcattatccttgcaaagctgcgccatattgagggtagcctgcggcgttatccgtgctttctgcgccttctgcactggcggagacggcgtcgcgctacagcccgccagcaggcacagcagtagtccagaaaacacatatttcatcaccattttttctcgaccgccttgttagtaaattgttatcgtgcaggttacgttaaataatcggcacattgtgcgaattgggccacacctcgacaagtctatgccgaaaaactcggattattccactgcgataccagcggataagggcggtcagaccctttctgagaaggagaaacagaggcactgatgcaggaaaaaattcactggattactcatttgcgcggcattgcctgcatgatggtggtcatgattcatagtaccacctggtatatcacgcatccgcacaccatcagcctgctggagtgggatctcgccaatatcctcaactctgcatctcgcgtcagcgtccccctgtttttcatgatttcaggctatctgtttttcggcgagcgcagcgcccagccccgccattttctgcgtatcgcgctgtgcattctcttttatagcgcgctgtcgctgctctatatcaccttgtttacccacatcaacgttgaactgtcgctgaaaaatttgctgcagaaaccggtgttctaccatctgtggttcttcttcgctatcgtagtcatttacctgctttctccgctggtgcaggttaaacaggtgagcggcaggatgctgctggcgctgatgctggtgctgggtattctggcaaaccccaatatggtcccggtgaaagccgcaggcgttgaatggctgccgctcaatctctatatcaacggcgatacgttctactacgtgatgtacggcgtattagggcgggcaatcggcacgctggataccgataaaaaatggctgactgcgctctgcgctgggctattcatcacgggagtatgggtaatatcacgcggcacgctgcacgaactgcgctggcgcggcgattttggtgatacctggtatttatattgcggccccgcggtttttgtctgcgcgctcgccctgctgacgctggtaaaaaatacgctcaatacgcgtcagctgccgtttattgcgcttattgcgcgccattcgttaggcatttacggatttcatgcgctgattattcacgcgctgcgcgccagcggactggagctgacccgctggccaatgttggatattgcctggatattcagcgctgcgctgctgggtagcctggcgctatcaatgttggtacagcgaattgacagccgccgactggtgagctgaaaaacggcgcctgcggttcaacgccggcgccgtcgtttactcagcgggctcttccgtgactgcgccgacctctcttcgctgtccgctgacagcttattccactgagttattgcgagctttatccgtgactttagcgggataaggcgttgccgacgcgccgtacatacagacaaaccacgccatcacgtaaatacttttttcacgccacggagccgggacaaaccaggcgccgaccagcagcaatcccaccgacagcagcaccaccagccggcacagagagataaaatcgccgtctcgctgtgcttcttgcgccgttcgctgatgcgtgagcacagcaaacatccccatgaccagaacgcccagaaaatagcctttaccgctaaataatgggcaggttcgccagattcccaccagataaaccagtgcgccaatagacatcaacagccttgcaataagattgtttttcatggtgcctccctggcataagacaggccccattgtggactggcagaacgcgtttatccgtacttttcgtccctgaaacgataaattcagaatatataaatacactcgataactacatgaatttaaaattattcatgagatgaattcgccccatcgacaggggcgaaagaatcaggacatcagcggtaaaagctgctgataaatctggcggaaggtttcccggcgaggggcgtaacgagcaaagcgctcggcatcaggacgatgagcctgttccagcgggagctgaggaagtagatcggaaaacgcgatattttgatgcaacgccagctgggccagccgcgccgcgccaagcgccgggccgacgtcaccgccggtgcggaaatccagctgctggccgctaatatccgccagcatttgccgccagtaggcgctgcgcgcgccgccgccgataagcgtgacgctctcgggcttcacgccgcaggcgtgaaccacatccataccgtccgccagcgcataaccgacgccctccagcaccgcccgcgccagttccgccggaccatgttgatgagtcaggccgaaaaagacgcctttggcctgcggattattgtgcggcgtacgttcaccggagagatagggcaggaaccagaccggatcggcatcgtcgttcgccgcttccgccgccgcaatcagcgccggaaccgtgccgaggccggttaatgtcgccgcccaatcgaggcaggaagccgcgctcagcatgaccgacatcagatgccagcgcccgggtagcgcgtggcagaaactgtgtacggcgctttccggcttgctaagaaagccgtcgctgacggcaaagtagacgccggaggtccccagcgacagcatcgcctggcccgcatccgccatgccaacacccaccgcccccgccgcgttgtcgccgccgccggccaccaccagcgcttccggcatattccacgactgcgcgacggccgggcgcagcgaacccgtcacttcacatccttcgaacagcgccggcatgttatcgcggctcagaccgcaggcggcgagcatctcatcgctccagtcgcggcgcgccacgtccatccacatcgttccggcggcatcggacatatcgctggcaaactcaccggtcatgcgcaaacgtaaataatcttttggcagcaggactttatcgacctgtttgaagatctcaggctcgtgacgttgtacccacagcagcttcggcgcggtaaatcccggcatcatcaggttgccggttatctgccgcgaacggctgacgttctcttccagcagcgcgcactcttcaccgcagcggccatcattccataaaatcgccgggcgcaggacgcgctgttgcttatccagcagcgtcgcgccgtgcatctggcccgcaatacctaacgctttgacttcgcgcagcgagtgctgcgcgcccagcgctttcatcgcgcggtccgtcgccagccaccagtgctcaggatcttgttcagaccataaagggtgcggacgcgacacgttgagcttttcggtatgcgaagccacgacctcgccttgctcgttgagcagaatagccttgacgcccgaggtgcccagatcaatcccgatatacatacagcctctccttactgacgcgccacggctaagcgtggcgcgaataaagcatcggttatcgccaatgcccgggctcgccgggcatcatcgccctcattagcgatcaaagaggtaacggttaaccacgttttccagcagttcctgatggccgctctggtgctccggcgccaggttatgctgagtggcatactgggcaatgtccgccaggttcatctggcctttcaggatctgctgacccagctcgccgttccagccggcatagcgcctggcgacgcgtttatccagctcgccgtcttcaatcatacgagcagcgacttttaacgccagcgccatggtgtccatcgcgccaatgtggccgtagaacaggtcgtatttgtcggtgctctgacgacgcactttagcatcaaagttcaggccgccggtggtgaagccgcccgctttcaggatttcgtacatcaccagcgcattctcttcaacgctgttcgggaactggtcggtatcccagcccagctgcgggtcgccgcggttagcatcaacggaaccaaacagacccagagcaatggcggtcgcaatttcgtggtggaaagtgtggccggccagcgtcgcgtggttcgcttcgatgttcagtttgatctctttttccaggccgaactgtttcaggaagccatagacggtagacgcgtcgtaatcgtactgatgcttggttggctcctgcggtttaggttcaatcagcagcgtgccctggaaaccgattttatgtttatgctccacgaccagctgcataaagcggccaatctgctcgcgctcctggcgcaggtcggtattgagcagagtttcatagccttcgcggccgccccacaggacgtagttttccccgcccagtttgtgggtcgcatccatcgcggtcaccacctgagtggccgcccagctgaacacttccggatccgggttggttgccgcaccggcaccgtaacgcgggttcgtaaagcagtttgccgtaccccacagcagcttgacgccgctctgctgctgtttttccgccagcacatccaccatctgcgcgaagttgttggcatactctttcaacgacgccccttccggagaaacgtcaacgtcgtggaagcagtaatacggtacgtttagtttttggaaaaactcaaacgcgacatcggctttgcgtttcgccatttccagcgcttcgcccggctgctgccacgggcggttaaaggagcccacgccgaacatatcagcgccgttccagcagaaggtgtgccagtagcaggccgcaaagcgcaggtgctcttccatccgtttgcccaggaccagctcatccggattgtaatgacggaaagccagtgggttagcggatttcgggccttcataacgaacgcgatcgagctgatcaaaataggtctgcataatgaactccatattcagggatgcggcgagtaataagtcataagccaatatagaattctctttttagtttcctcaattacgttatttcacactgtgattgagagaatccacaaacgtgcgccaggtcgcaaaaacaatagaacaacgccctcacttcgctgcttacgccacgagagatcaatgaaatacgatgagaactaattattaaagtacgatcgcggtcataaattaacaaataaacaaaatttcataacggcaaaataagcatagataattgccagcgctcctttccgcgttaaaaatctgctacgtatcaggccatttatttttatcgttcgtcttatcctgcactttacaaaaaaggtgttattattatgaagataaagaacctttgcctaacgctctgtgcttcactcctcctcaccagcctgtcgggcattgcgaaagaagtcaaaattggcatggcgattgacgacctgcgccttgagcgctggcaaaaagatcgcgatatttttgtcaataaagctgaatcattaggtgcaaaagtattcgtccagtcagccaatggcaacgaagaaacgcaaatgtcgcaaatcgaaaatatgattaatcgcggcgtcgacgttctggttattattccctataacggtcaggtgctgagtaatgtgataaaagaggctaaacaggagggaattaaagttctcgcctacgatcgtctcatcaataacgccgatattgatttctatatttcttttaataatgagaaagttggcgaaatgcaggcgcaaagcctggtcaataaagtgcctcagggcaactatttcttaatgggcggctcgccggtagacaataacgccaagcttttccgcgccggccaaatgaaagttcttaagccctatattgatgaaggaaaaattaaagtcgtcggcgatcagtgggtcgacggatggctaccagaaaatgcgttgaagattatggaaaacgccctgaccgccaacaataacaaaattgatgcggtcgtcgcctctaacgatgccaccgccggcggcgccattcaggcgttaagcgcccaggggctcgcaggcaaagtggcgatttccgggcaggatgccgacctcgccggcgtgaagcgcattatcgctggcactcagacgatgaccgtttacaaaccgatcgctgaccttgccaccaccgcagcagagatcgccgtcgaactgggcaacgataagcagccgaaggccgacgccacgctcaacaacggcctcaaagatgtgccttcccggctgctgacgcccattgaggtcaataaagacaacattgaccagacggtaatcaaagacggtttccacaaaaaaagcgagctgtaatctctgacgccctctcccgggggcgttgccccatccagccggatatcgcttatgtggagtctctatgtcctggttactcgaaatgaaaaacattactaaaaccttcggtacggtgaaggcgattgataatgtcagtctgcggcttaacgccggagaagtggtctcgctgtgcggcgaaaacggctccggtaaatccacgctcatgaaggtcctttgcggaatatatccgcacggtagctatgagggagagattattttttccggggaaacgttgcggccgggccatatacgcgataccgagcgcaaagggattgccatcattcatcaggagctggcgctggtaaaacatctgaccgttctggagaatatttttctcggcgcggagatctcccgccacggtctgctggattacgaaaccatgaccttacgctgcgaaaagctgctggcccaggtcaatttagccatatcacccgatacccgcgtcggcgatttgggccttggccagcagcagctggtcgaaatagcaaaagcgctgaataaacaggtacggttgttaattctcgacgaacccaccgcctcgttaacggagcaggagacggcaattctgctgaatattattcgcgatctgcaaaatcacggtattgcctgtatttacatttcccacaagctcaatgaagtcaaagccatctccgacaccatctgcgtgatccgcgatgggcagcatatcggtacccgtaacgctgacggcatgaacgaagatgacattatcaccatgatggtcggccgcgagcttaccgccctctatccgagcgaagcccacagctgcggcgaggaaatcctgcgggtggaaaacctgacggcctggcacccggtgaatcgccatattaagcgggtcaatgacgtctccttttcgctgcggcgcggtgaaatactagggatcgccgggctggtcggcgcgggccgtaccgaagcggtccagtgcctgttcggcgtctggccgggccgctggcagggaaaaatctttattgatggccagcaggtgacgattcacagctgccagcaggctattgcgcagggcatcgccatggtaccggaagacagaaagaaagacggtattgtgccggtcatggcggtgggtaaaaacatcaccctcgccgcgttaaaccagtttaccggtccgctgagcagccttgacgatgccggagagcagcactgtattcagcaatccatccagcgtttgaagatcaaaacctcatcgccggagctggcgatcggtcgcctgagcggcggcaatcagcaaaaggcgatcctcgcccgctgcctgctgctgaacccgcgcattctgatactcgatgagcccacccgcggcatcgacatcggcgccaagtacgaaatctacaagctgattaatcagctggtgcagcaggggatcgccgtcattgtcatttcatccgaactacccgaagtgctggggctaagcgaccgggtgctggtgatgcatgaaggtaaattgaaggctaatctgatcaaccggggtctgacccaggaacaggtgatggaagccgcactgaggagcgaacgccatgtcgaagaacacatcgtctgaaatgaaactcaccccacctgccgctggcgcgctatcggggctgaaggggatgaacctccaggtattcgtgatgatcgccgctatcgtggccattatgttgtttttcacctggaccaccgaaggcgcttatctgagcgcgcgtaatatctccaacctgctgcgccagaccgccattaccggcattctcgcggtcggcatggtgtttgtgattatttccgccgagatcgatctctccgtcggctcaatgatggggctgctcggcggcgcagcggcaatatttgacgtctggctgggctggccgctaccgctgaccattgtggtcaccctggcgcttggcctgctgctgggggcctggaacggttggtgggttgcctatcgtaaagtcccctcgtttatcgtgacgctcgccggcatgctggcatttcgcggtattttgataggcattaccaacgggaccaccgtctctcccaccagcccggcaatgtcgcaaatcggccagagctatctgcctgatggcgttggctttggtatcggcgtggcgggcatggcggcctttatcatctggcagtggcgcggccgtatgcgacgtcaggctctcggcctctccacgcccgcctccgcttcagccgttggccgccagacgattaccgccgttattgtactgggcgccatctggctgttaaacgactatcgcggcgtcccgacgccggtactgattctcgccgcgctgctgctggcgggcatgtttatggccacccgtaccgcgtttgggcgccgcatctacgccatcggcggcaacctggaggccgcgcgtctatccggcatcagcgtggaacgcaccaagctggcggtgttcgccattaatggcctgatggtggcgattgccgggttgattctcagctcgcgtcttggcgccggttccccttccgccggcaacatcgccgaactggacgccatcgccgcctgcgtgatcggcggtaccagcctcgccggcggcgtcggcagcgtcgcgggcgcggtcatgggcgcttttatcatgtccgcgctggacaacggcatgagcatgatggacgtcgccaccttctggcagtacatcgttaaaggggtcattttattgctcgcggtatggatggattccgccacgaaacgccgaagctgagggctgtgaaaaaaaatgcccgaattatttgcgctaccgccaaacttaggcacaagtagcttgaaaaaatccgggcattggccggtattgtatggcctgcaagagagaccaggaacaacactatgtttgaaaagcgtcaccgtattacgctgttattcaatgccaacaaagcctacgatcgccaggtcgttgagggcgtcggcgaatatttacaagcatcgcaactggaatgggatatcttcattgaggaagattttcgggcacgaattgaaaacatcaaagagtggttaggcgacggcgttattgccgattacgacgacccggaaattgaaaacctgctgatcgacgtgaatgttccgattgtcggcgtcggcggctccttccaccgcccggagtgctatccgccggttcactatatcgccaccgacaacgccgcgctggttgagagcgccttcctgcatctgaaggaaaaaggcattaaccgcttcgccttttacggcctgcccgcttccagctgtaaaggctgggccgccgagcgcgaacacgcgttttgccagctggtcgccagagagaaatatcgcggcgtggtctatcagggtctcgagacggcgccggaaaactggcagcatgcgcaaaaccgcctcgccgactggctgcaaaccctgccgccgcaaaccggcatcatcgccgttaccgatgcccgcgcgcgccacgtattacaggcctgcgagcggctgcatatccccgtcccggaaaagctgtgcgttatcggcatagataacgaagagcttacccgctacctgtcgcgcgtggcgctctcctccgttgcgcagggcacccgtcagatgggctaccaggcggcaaagctgctgcatcgcctgctggagaatgaagagctgccgcttcagcgtcagcttatcccgccgatgcgcgtgatagaacgccgctccaccgactaccgttcgctcaccgatccttcggtcattcaggcgatgcactatatccgtaaccacgcctgtaaagggattaaagttgagcaggtgctggacgccgtggggatttcccgctcgaatctggaaaagcgcttcaaagaggaagtcggcgaaaccattcatacggtgatccacagcgagaagctggaaaaagcgcgcagtctgctggtatcaaccaccctatcgattaacgaaatctcccagatgtgcggctatccgtcgctgcagtatttctattcggtgtttaagaaagagtacgacgtgacgccgaaggagtaccgcgaccggcacagcgaagtcatgatgtagcgcgcaaagaaaaatgcccgggcttacgcaccgggcatcaatgatgacatgtaagagcaattacatgtgcgcggctatcaaccgctggttatcctgatacatcgcgaagagatagttgttatagctcgaccctttggtcgaatagcccttcagcttatgaatcatcgtgctggcggtcacttcctgatcggctttacgcagctgcgcacgcgatttacggaacgacgagtaggccggatgcgtattcagatttctgacataggcctgaacggactcttccaccgaatcaaactgggagtagcccttcatcgcaccgcggcagtttccaccgccacacttcataccaaataaattgttgttcacccgcgccagctttgacgttccccagccgctttccgccgcagccatagtagcgaccatgctattcgggataatgtcgacgcgctcaagcagcgagttccatggaatatggcgagtattgccggaccacttcactttatagcgagaggcgatctctttcagccgcgtacgctcgctcggcgaccagcgcgcatcgtactgcttggaaacaagccagttacgatcggcggtaatcacctgattctgtttcgtaatgtaaggcattaccgtccggagaaacgcttttttccttggtgtcccggaagggtattttcgcaaatcaggaagtgaactgctctttacactattgcgagaatactcttgtttactgcttaccttgcttactttaacggtgcttttcttcttaactattggggctttatgactcgttgttgctgtgtgtgttgttgccagcacactacctgaaaatatgcaggtaagtaacatgagtatcgcggccccatatcgtcgaatgggagtcgatatcattaggtctcctggtcggatgcaatcattccaacgccttgtttttcacaaaaaatcgatagttgaatcgcgaatagtatcaaaaatacccagatgacgcacccacagaaatagtccaattccgaaaagctgtcatctgaaatcggtttccgccccatgacaacagtacaaaaatgcgacagccctcgcattttttgcttgttttttgaacgcgatcactcaccctttttcatcctccctggaaaagcgccggtgggatgagttcattagacagccagacgcgcaaactgaacaaaaaaccgcacacaggactccggaatgaaactcgctgcgcttgcgtcgctgctgttgcctgggatggccttcgccgcctggactaccgcagatttccccgcctttaccgaagaaggcaccggcagatttatcagtcaaaacgaggtagcaaagggtacgcgccctctgcggattaattttgaccaacagtgctggcagcctgccggcgcgatcaagctcaaccagatgctgtctatggaaccttgccgcgatccggcgccgcagtggcgcgtattccgcgatggccgctataccctggaagtcgatacccgttcaggtacgccaaccatgatggtctctctggaggagaaacagaccgccgccgccgcgccgcagatgaagcagtgtccgaaatgggatggcaagccgcttaccattgacgtcagcaaatccttcgccgaaggcagtaaagttcgcgatttctatagcggtaatatcgcgaccgtcagcagcggtaaagttaccctccagccggcgtttaacagcaatggtctgctgctgcttgaacgcgcggaaacggaagccgccgcgccgttcaactggcataacgccaccgtctatttcgtgctgaccgatcgctttgtcaacggcaacccggccaacgacaatagctatggccgccacaaagacggcatgcaggaaattggcaccttccacggcggcgacctgcagggcctgaccagcaaactggattacatccagcagctcggcgttaacgcgctctggatcagttcgccgctggaacaaatccacggctgggtcggcggcggtacgaaaggcgatttcccgcactacgcctatcacggctattacacccaggactggacgaagctggatgccaatatgggaacggaagacgatctgcgccgcctcgtcgatgaggcccacaagcgcgggatccgcattctgttcgacgtggtgatgaaccataccggctacgcgaccctggccgatatgcaggagtttcagtttggctcgctgtacatccagggcgatgagctgaaaaagaccctcggagagcgctggaccgactggaagccccgcgcgggacaaagctggcacagctttaacgactacattaacttcagcgacaaagccggttgggaaaaatggtggggtaaaaagtggatccgcaccgatattggcgattacgacaaccccggatttgatgacctgacgatgtcgctggccttcctgccggatctgaaaaccgaatccacggcgccatccggcctgccaaacttctatcgccataagccggataccgcggccaaagcgatccccggctatacgccgcgcgattatctgacccactggctgagccaatgggtgcgcgactacggcatcgacggcttccgcgtcgataccgccaagcacgtcgagcaggccgcctggctgcagttaaaaacccaggccactgaagcgctggcggaatggaaaaaagccaatccggataaagcgctggataacgcgccgttctggatgaccggcgaggcctggggccacggcgtgatgcagagcgactactatcgccacggttttgacgcaatgctgaattttgattatcaggatcaggcggcgaaagcgacaagctgcctggcgaatatcgacctgacctggcaacatatggcagagaagcttcaggatttcaatgtgttaagctatctctcctcgcacgataccagcctgttccgcgaaggcggcagcacggcggcggaattgctgctgctcgcgcctggcgcagtgcagatcttctacggcgatgaatcttcgcgaccgttcggcccgaccggctccgatccgcttcaggggacgcgctcagatatgaactggcaggacgtcagcggcaaagccgcgcgcagcgtgacccactgggagaaactgggccagttccgcgcccgtcatccggcgattggcatgggtaaacaaaccaccctatcgatggcgaaaggctacggctttattcgcgagaccggcgatgacaaagtgatggtggtatgggcaggccagcagtagccttctgacccaaggctcccctgacactcgggggagccgcttcagaataaaaatccaaaatatcttaatttagcagcataaaaacaaaatatctcactgatacctcgatttgcaccctgtctgcgctggcgttatggttacccactttcctggaataccgacagactaatcgcgatgacattttcactttttggcgacaaatttacccgtcattcgggcatcacccgcttgatggaagacctcaatgacggcctgcgtaccccgggcgccatcatgctgggcggcggcaatcccgcgcagattccggaaatgaatgattacttccatagcctgctggccgacatgctgaacagcggcaaagcccttgatgcgctttgtaattatgacggtccgcagggtaaaagcgagctgctggccctgctggcgcagatgctgcgtgatgaactgggttgggagatcgaaccacagaatattgcactgacaaacggcagtcagagcgcgtttttctacttgtttaacctcttcgcaggccgtcgagcggatggaaccacccgtaaagtgctgtttccgttgacgcccgagtacatcggctacgccgatgccggcctcgaagaagatctgtttgtcgccacccgcccgaacattgaactgctgccggaaggccagtttaaataccacgtggatttcgaacatttgcaggtcacggacgagacgggaatgatctgcgtttcccgccccaccaacccaacgggcaacgtgatcaccgacgatgagctgatcaagctggatgcgctggccaaccagcacggcatcccgttggtgattgataacgcctacggcgttccgttcccgggaattattttcagcgacgccaggccgctgtggaatccgaatatcgtgctgtgcatgagcctctccaagctgggtctgccgggtagccgctgcgggattatcatcgctaacgaaaaaatcatcaccgccatcagcaatatgaacggcattatcagcctcgcccccggcggaatggggccggccatgatgtgcgagatgattaaacgcaacgatcttctgcgcctgtcggaaacggtgataaagccgttctactaccagcgcgttcaggagactatcgccattattcgccgctatttgccggaagatcgctgcctgattcataaaccggaaggcgcgatttttctctggctatggtttaaggatctgccgatttctaccgagctgctgtaccagcgcctgaaaaagcgcggcgttctgatggtgccgggcgactatttcttcccgggcctggataaaccgtggccgcacacgcatcagtgcatgcgcatgaactatgtgccggacccggagaagattgaagcaggcgtgaagattctcgccgaagaagttgaacgcgcatggggtgaacaggacgcgtaaacgagcgccagaatcctgaataatccagatatattcccggctcgcgctgcgctcagccgggctacaggcttccagcgttctgcggacaggcagcccggacaaggcgcgccagcgccgcctccgggaacacgccgtaagaaggcatcatcgctacatcgccagcgccatccgctggcgacgttcagcggctattctctccagctccatcggttccatgcagcgcagcgcctgcgtcgggcatgccgccacgcaggccgggccttcttcccgatggctgcacaaatcgcacttcagcgcctgtacgccctcctccacccgcatcaccgtcatcgcgccataggggcacgccaccatgcagcttttgcagccgatgcagcggcgctgatccacgcgccagaccgaattttcccggcggatagcgccctcggggcagacgttggcgcagggcgcatcttcacactggcggcaaagcgtcgccgtcgagagttcgtcatttttcaccacgcggatccgcggcgcaaagcgcatggcggaaacgccagaacagtcctggtcccgctgatgggataccacgcaggcgacttcacaggtacgacagccgatgcacttttgcgcatccgcgataataaaccggttcatccttgctccactggggataaaaacgcagagtgccagaaaaaaccgcttccgcgccttgatcctgaatggagtcagcggcgttttctctcagatgcccgggacaatttggtcatctgccttacccttcccgcacggaaaagcccagttcgcgggaaatcgcctctgccgtatcgcgcagcggcttgagtaaattcttctctcctacctgcttgaggcgcgatgttgataaggagatagaaatggcataaggcacgcgtccatgaatatcgaaaaccgggaccgccaggcaggacacgcccaactcgttctcttccctgtccatcgccatattacgctcgcggatctgcgccagctcatcatgcatcgcaggtaagccggtaatggtattccgggtcagcggctgaataatatcctggtgtgaattccagtagctctcaacgtagtcaggatggccaaacgccatataaatcttgcccattgccgagcagtacagcggcatatgctggccaatataggcgcgcgtacgcagcatgccggtggtcggctccagcttataaatcaggatagcgtggtcatcttcacggctggagaagttcaccgtctcgccggtggccaggttgagcgcctcaagatgcggcgccgcgacgtggatgatgttgagcgacgacaaagccttttggccaacggcgataaactttgtcgtcagacgatagctccccgccgccggggctggcgtcacgtagccgcaggattgcagcccctgcaataagcgatgaacggtgcttttgttcaggcccgccagttccgacagatgcgccagcgggcatccgtttgggtaattactcaggatctcaatcagcatcaacccacgaaaaaggctctggcttccggcaggcctctccttgtcttgcgttacatcgctctcttttgtgcccatcgtttccgctccccgtttttgtcgcgttcagatggtagcgcaaagtgtgtttcagttcacgatctgaaccgaaaaaacacaactttatgatttttatgatttttaaaaataacgctgcccgttgatctgataaaaattgatcgctatatttgaaatcagatttcgcatagtgaaatttagagataaaaaagcgatcaaatctgaccaggaaaacaggaatgaaagtaacgtttgagcagttaaaagaggcattcaatcgagtactactggcacggggtatcaccgcagaaaccgccgatgcctgcgcagaaatgtttgcccgcaccaccgaatccggcgtctattctcacggcgtgaaccgctttcctcgcttcatccagcagctggacaacggcgacatcatccccgaggctaaaccgcagcgggtaaccagcctcggcgccatcgagcagtgggatgcccagcgctccatcggcaacctgacggcgaaaaagatgatggaccgggccatcgaactggcttccgatcacggtatcggcctggtggcgttacgtaacgccaaccactggatgcgcggcggcagctatggctggcaggcggcggaaaaaggctacatcggcatctgctggaccaactccatcgccgttatgccgccatggggcgctaaggagtgccgtatcggcaccaatccgctgatcgtcgccattccgtcaacgccgatcaccatggtggatatgtcgatgtcgatgttctcctacggcatgctggaagttaaccgccttgccggccgcgagctgcccgtggacggcggattcgacgatgaaggtcatttgaccaaagaaccgggggttatcgagaaaaaccgccgtattttgccgatgggctactggaaaggttccggcctgtcgattgtgctggatatgattgccaccctgctttccaacggctcttccgttgccgaagtgactcaggaaaacagcgatgaatatggcgtttcgcagatcttcatcgccatagaagtggataagctgatcgatggcgcaacccgcgacgccaaactgcagcggattatggatttcatcaccaccgccgaacgcgccgatgaaaatgtggcggtccgcctgcccggccatgaatttacccgactgctggatgaaaaccgccgcaacggtattaccgtcgatgacagcgtatgggccaaaattcaggcgctgtaaggagctcacccatgatttttggccatattgctcaaccgaatccgtgtcgtctgcccgcggccattgaacaggcgcttgatttcctgcgcacgacggattttcacgcgctggaacccggcgtcgtggaaatcgacggcaagaacatcttcgcgcagattattgacttaaccacccgcgatgccgctgacaatcgtccggaggttcaccgtcgctatctggatatccagtttctggcgtggggtgaagaaaaaatcggtatcgccattgataccggcaataatcaaatcagcgaatcgttgttagaacagctcgatattattttctatcacgacagcgaacatgaatcgttctttgaaatgacgccaggcaactatgcgatatttttcccgcaagatgtgcatcgtcctggatgtaataaaactgtagccaccccgatccgcaaaatagtcgttaaggtcgctatttcagttttataaaaaggagcacaaaatgaattcgaataataccggttacattatcggtgcgtacccctgtgcaccctcatttcaccaaaagagtgaagaggaagagacggaattctggcggcagctctccgacaccccggatattcgcgggctggagcaaccctgccttgaacatcttcatccgctcggcgacgagtggttattgcgccataccccgggacactggcagattgtcgttaccgccatcatggaaaccatgcgccgccgcggtgaaaacggcggctttgggctggcatccagcgacgaagagcagcgcaaagcctgcgtggagtactatcgtcacctgcagcagaagatcgctaaaatcaatggtaagaccgccggaaaggtcattgcccttgagcttcacgccgccccgctggcgggcaatgccaacgtggctcaggctaccgacgcctttgctcgttcattaaaagagattacccgctgggactggtcctgcgagctggtgctggagcactgcgacgcgatgaccggcaccgcgccgcgcaaaggatttttgccgttagaaaacgtgctggaagccattgccgactacgacatcagcatctgtatcaactgggcgcgctctgccattgaagggcggaataccgttctaccgctcacccatacgcagcaggcaaaacgggcagggaagctcggcgcgctgatgttttccggcacgacgcaaaccggcgagtacggcgaatggcaggatttacacgcgccgttcgcgcctttctgcccgcagagcctgatgaccaccgaccacgcccgtgaattatttgcctgcgcaggagccgatcccctgcaattctcaggtatcaaattactggaaatcactgccagcgcaaacgttgaccatcgcatcgcgatattacgcgacggcatctcagcgctaaaacaagcacaataataataaccaccttcatcgccagaatattttttaatattacgagactataaagatgaatataacctctaactctacacccaaaaatataccgcgccagcgctggttaagaattattcccccaatactgatcacctgtattatttcttatatggaccgggtcaatattgcctttgccatgcccggcggcatggacgccgacttaggtatttccgccaccatggcggggctggcgggcggtattttctttatcggttatctatttttacaggttcccggcgggaaaattgccgttcacggcagcggtaagaaatttatcggctggtcgctggtcgcctgggcggttatctccgtgctgacggggttaattaccaatcagtaccagctgctggccctgcgcttcttactaggcgtggcggaaggcggcatgctgccggtcgttctcaccatgatcagtaactggttccctgatgcggaacgcggtcgcgccaacgcgattgtcattatgttcgtgccgattgccgggattatcaccgccccgctctcaggctggattatcacggttctcgactggcgctggctgtttattatcgaaggtttgctctcgctggttgttttggttctgtgggcctacaccatctatgaccgtccgcaggaagcgcgctggatctctaaagcagagcagaactatctggtcgagacgctggccgcagagcaacgggccattgccggcaccgaagtgaaaaacgcctctctgagcgccgttctctccgacaaaaccatgtggcagcttatcgccctgaacttcttctaccagaccggcatttacggctacaccctgtggctgcccaccattctgaaagaattaacccacagcagcatggggcaggtcgggatgctcgccattctgccgtacgtcggcgccattgccgggatgttcctgttctcttctctttcagaccgaaccggtaaacgcaagctgttcgtctgcctgccgctgattggcttcgctctgtgcatgttcctgtcggtggcgctgaaaaatcaaatatggctctcctatgccgcgctggtcggctgcggattcttcctgcaatcggcggctggcgtgttctggaccatcccggcacgtctgttcagcgctgaaatggcgggcggcgcgcgcggggttatcaacgcgcttggcaacctcggcggattttgtggtccttatgcggtcggggttctgatcacgctgtacagcaaagacgccggcgtttattgcctggcgatctccctggcgctggccgcgctgatggcgctgctgctgccggcgaaatgcgatgccggtgctgcgccggtaaagacgataaacccacataaacgcactgcgtaaaatcgagcccggcggcgctgcgcctgccgggcctgcgaaatatgccgggtcctcccggcaagaatgagatgcgaaagatgagcaagaaacaggccttctggctgggtattgattgtggcggcacgtatctgaaagccggtttatatgatgccgaaggtcatgaacatggcattgtgcggcaagcgctacagacgatgtcgcccctgccgggttacgccgaacgcgacatgcatcagctctggcaacactgcgcggcaaccattgccgaactattacaacgggcaggggtatccggtgaacagattaaaggcgtgggcatctccgctcagggtaagggtctctttctcctcgataagcaggatcggccgctgggtaacgccatcctctcgtccgatcgtcgggcgctgaatatcgttcagcgctggcagcgggaccgtattcccgaacggctctatcccgttacccgccagacgctatggaccgggcatccggcttctctgctgcgctgggtcaaagagaatgacccccagcgctacgcgcaaattggctgcgtgatgatggggcatgactatctgcgctggtgcctaaccggcgtgaaaggctgcgaggagagcaacatctccgagtccaacctctacaacatgtccacgggccagtacgacccgtgtctgacccaatggctggggatcggcgaagtggatagcgcgctgccccccgttgtagggtcagccgaaatatgcggggagatcaccgctcaggcagccgctttaaccggtctggcggcgggtactcccgtcgttggcggcctgtttgacgtggtctccaccgccctttgcgccgggattgaggatgagtcgaccctcaatgcggtgatggggacctgggccgtcaccagcggtatcgctcacggtctgcgcgaacatgaggctcacccttacgtctatggccgctacgtcaatgacggccagtatatcgttcacgaagccagcccgacctcatccggcaacctcgaatggtttaccgcccagtggggcgatctctcgtttgatgagatcaatcaggccgtagccagtttgccgaaagccgggagcgagctgttttttctgccgtttctctacggcagcaacgccgggctggagatgacctgcggcttttacggcatgcaggcgctgcatacccgcgcgcacctgctgcaggcggtttatgaaggcgtggtattcagccatatgacccatctcaaccgtatgcgcgaacgctttacaagcgttcaggccctgcgcgtcaccggcggcccggcgcactccgacgtctggatgcaaatgctggcggacgtcagcggcttacgcgttgaactgccgcaggtggaagagaccggctgctttggcgccgccctcgcggcgcgcgtcggcaccggcgtataccgcagctttagcgaagcccggcgcgcccggcagcacccggtacgcacgctgctgcccgatatgaccgcccacgcgcgctatcagcgcaaataccgccactaccaggatttgattgaagcactacagggctatcacgcccgtattaaggagcacgcattatgagccgaccattactgcagctggcgctcgaccacaccagccttcaggctgcgcagcgcgatgtcgccctgctacaggatcacgttgatatcgtggaggcggggaccatcctctgtttgaccgaggggcttaacgcagttacagccctgcgcgcccagtgtccgcagaagatcatcgtcgccgactggaaagtcgccgacgccggtgaaaccctggcgcagcaggcctttggcgctggcgccaactggatgaccatcatctgcgccgcgccgctcgccacggtcgagaaaagccacgccgtggcccaggcctgcggcggtgaaattcagatggagctgttcggcaactggacgctggatgacgcccgcgcctggtaccgtaccggcgtccatcaggcaatttaccatcgcgggcgcgatgcccaggccagcgggcagcagtggggggaggcggatctggcgcgcatgaaagcgctctccgacattggccttgagctatcgatcaccggcgggattactccggccgatctgccgctgttcaaggatatcaacgtcaaagcgtttattgccgggcgcgcgctggcaggcgctgcccatccggcacgggttgccgccgaattccacgcgcaaatcgacgctatctggggagaacagcatgcgtaaccacccgttaggtatttatgaaaaagcgctggcgaaggatctcagctggcctgagcggctggtgctggccaaaagctgcggttttgattttgtcgaaatgtcggtggacgagaccgacgaacgcctttcgcgcctggagtggacatcggcccagcgggcatcgctggtgagcgcgatgctggaaaccggcgtcgctattccctcaatgtgcctgtccgcccatcgccgtttcccctttggcagccgcgacgaggcggtacgcgagcgggcgcgggagattatgaccaaagccatccgcctggcgcgcgatctggggattcgtactattcagctggcgggttacgacgtctattacgaagagcacgatgaaggcacccggcagcgttttgccgaagggctggcctgggcggtagaacaggccgccgccgcgcaggtgatgctggcggtggagatcatggacaccgactttatgaactccatcagcaaatggaaaaagtgggacgagaggctttcgtcaccgtggtttaccgtctatccggacgtcggcaacctcagcgcctgggggaacgacgtcaccgccgagctgaaactgggtatcgatcgtatcgccgccatccacctgaaggacacgctgcccgtgaccgacaatagcccgggccagttccgcgacgtgccgttcggcgaaggatgtgttgattttgtcggcatctttaagacgctgcatgaactgaactaccgcggttcgtttctgattgagatgtggacggagaaggccagcgaaccggtgctggagattatccaggcccggcgctggattgaatcacggatgcaggaaggaggtttcacatgttagaacaactgaaagccgaggtgctggcggcaaacctggcgctcccggcgcaccggctggtcacctttacctggggcaacgtcagcgcggtggatgaaacgcgccgtctgatgatcattaagccctccggcgtcgaatatgaggtgatgaccgccgacgatatggtggtcgtagagatcgccagcggtaagatcgttgaaggcgctaaaaaaccctcttcggatacgccaacgcatctggcgctttatcgtcgctatccgcagatcggcgggatcgtgcatacccactcccgccatgcgacgatctggtcgcaggccggtctcgatctccccgcctggggcaccacccacgccgactatttttatggcgccattccctgcacccggccgatgaccgttgaggagattaacggggagtatgagtatcagaccggcgaagtgattatcaaaacctttgaacagcgcggtctggatccggcgcaaatcccggcggtattagtccattcgcacggcccgtttgcctggggtaaagatgcggccgacgccgtacataacgccgtggtacttgaagagtgcgcctatatgggcctgttctcgcgccagctggcgccacagctgccggatatgcagtctgaactgctcgataaacactacctgcgtaaacacggcgcgaatgcctattacgggcaaaactaacaccgtgggattcccggatggcggctaacgccttatccgggctaccggcggtctgcggtcccgtagcccgggcaaggcgctttgcgccgccccgggggaagcgtgcaggatgttgcagaattttcccggaggcgatgctgcgcatctgtccgggctacgcgtccccggcggtctgcggtcccgtagcccgggcaggcgctttgcgccgcccccgggggaagcgtgcagaatgttgcagaattttcccggaggcgatgctgcgcatctgtccgggctgctcgtccccggcgggaaaacccatcaaccctacgccgaattaatatgttccttgcagtaacgacgcttccacgccgcgggcgtcaggctggtatgcttacggaaaatcttgcgaaaatagccgacatcgttaaatccgcatttcatcgccacctcggtgagcgacagggaatcgctgataagcagcttttccgccgccctcacccgctgacggtgcagcgcttcggttaaggtcagccggaaaacatggcgataaatccgccccagataatcggcgttgcagtgcagctcctgcgccagcgtggatgcggaaaggggcaaatgaaaccgggtacgaatgatttgctgcgctctccacgccagcgcgttgccggggctgtcggcgggctgttcacccgctgccgccgaaacttgctgcagaatcagcagcaggatcagctccagcgccacgctacgatgaatattttcctgctcgcgtaagaattggcggaacaacgaaataatatactgcggctcgctgacgcgcgtgtgctgcggaatcgacagcagcgcctcaggcagcgaaacgttttcacctgaggtcacttcaaaatgcagccagtagaattttaaatctgccggaaattgcccgattccgacgtgtaaacgccgcggccagagcaataaactttccccggcgttgacgctaaaaatctcgttgttttcgcggatcgttaatgtccctttttccacaaagattatttcccaagagtgaagctgacgagccggatggctgccgatgcctcgggaaataaacaacccaccattttgcaccttaatcggaagtgacatggacaattcaagcatagacattcaatattccgcttttaatagcattaataacccctattgcctttgattattcacgataaaatagccgtctgctggatcgaaatcacatttttaccatcaggtcggaatcgtcctctttttatactttttccttcccttgttgcccccaacatttagtgcagaataaataacgtaatttgcaaataacacaattaaagcccgcacttcagcgggatattattcgcacatcatctccgggagttatttatgacttcggctccgattaccacaactgatttggcacagcgtgcccaggacgacaaattatcccttcgggaaaaaataggctacggattgggcgacgcgggcgggacggtgattacctgcctgatcatgaactttttaactttttctataccgatgtctttggcctgacgcccgcgctggtcgggaccctgtttctggccctgcgcgttttcgacgccgtttccgacccgattatgggcgtgctggccgaccgtacccagagccgctggggacgctttcgtccctggcagctgtggattgccgtgccgatcggcgttatcggcgtcctgacgtttaccgtgcccgacgccagcatgggggtaaaaatcgcctgggcgttcggcacctatctgctgctgtcggtgagctacaccgcgataaacgtcccctactgcgcgctgatcaacacgatgaccacgcgtcatagcgaggttatctcgtgccaggcatggcgctttgtcctgtgcggcgtggcgggattcttagtctccgttgggctgccgtggatggtaaaagcgctcggccagggcgataccgcacaggggtatcagtacggcgtcggcgtactctgcgccatcgcggtggcgatgttcctgtgctgcttcttctgggttcgcgaacgcgtctcgctggatgtcatggggaaatttaccctgcgcgagcacatcgccgggctgcgtaaaaacgaccagctgctgctgatgctggtgatgtcatttctgcttatcaacgtcttcaatatccgcggcggcggctacatgtacttcatcacctacgtgctgggcggctccaccggctacacctcgctattcttcaccatggtaaccttcgcctcgattgcgggctccgtcatcatcaacctgctctcgcgccgctttgataccgtcaaactctactactacaccaacctggtgctggccgctctggccgtggcgatgtggtttttgccaaccgggcaggcgtaccagaccctgtggctggtcgtcatcctcggcaacggcattattctcggctttaccctgccgctgcacttttcgctgatggccttctccgacgactacggcgaatggaaaaccggcgtgcgttcttccgggatgaacttcgcctttaacctgttctttatcaagctggcgtgggcctccagcgccggcattatcagcctcgtgtttatctacgtggcctatcagccgggcgtggaaaaccaaacggcatcatcactggcgggtatcgcctccatggagaccctgctgcccgccctgttccatctgctgctggccttcactattcgcgcctgcaagctcaacaattctatgatggcgcgcattgccagcgacctgcgcacgcgtcacgttcagccttaaggagtccgccatgtctgttatggaagtcgatctgcacaaactgaaaatcaacgacccgttcctcggccagtaccagcagctggtgcgcgatgtggtgatcccttatcagtgggatgcgcttaacgaccgtatcgaggaggcggacccgagccatgcgatagagaacttccgcatcgccgccgggcgacaggagggcgaattctacggcatggtctttcaggacagcgacgtggcgaaatggctggaggcggtggcctggtcgctgtgtcagaagccggaccccgggctggaaaaaaccgccgatgaggtgattgaactggtcgcggccgcccagtgtgaagatggctatctgaatacatatttcacggtcaaagcgccagaggagcgctggaccaacctcgccgaatgccacgaactgtactgcgccgggcacatgattgaagcgggtgtcgccttcttccaggccaccggcaaacgtcgtctgctggatgtcgtctgccgcctcgctgaccacatcgatagcgtgtttggccccggagataaccggctgcacggctaccctggccatccggaaatcgagctggcgttaatgcgcctgtatgacgtcactcaggagccgcgctatatcgcgctggtgaagtacttcgttgaggcgcgcggaacgcagccgcatttttacgatatcgaatacgagaagcgcggcaaaacctcctactggaacacctacggtccggcgtggatggtgatggataaaccctacagccaggcgcatcagccgatttccgaacagccggtcgccatcggccacgcggtgcgtttcgtctatctgatgaccggcgttgcccacctcgcccgtttaagtcaggacgagggcaagcgccgggattgcctgcgcctgtggaaaaatatggcccggcgtcagctgtatatcaccggcggaatcggttcgcagagcagcggggaggccttcagcagcgactatgacctgccaaacgacacggtctatgccgaaagctgtgcttccattggcctgatgatgtttgcccgccggatgctggagatggaagccgacagccaatatgccgacgtgatggagcgcgcgctgtataacaccgtgctgggtggaatggcgctcgacggcaagcacttcttctacgtcaatccgctggaagtgcatccaaaatccttaaaattcaaccatatttacgatcacgttaagcccgtccgtcagcgctggttcggctgcgcctgctgcccgccgaatatcgcacgggtactcacctcgctggggcactatatctacacgccgcacgacgacgtcctgtacatcaacctgtatgtcggcaacagcgtggagatcccggtgggcaatgaggcgctacgcctgcgcatcagcggcaactatccgtggcaggaacaggtgaagatagtcatcgattcatcttcaccggttaatcataccctggcgctgcgtctgccggactggtgcgataagccgcaggtcacgctcaacggcgcgccggttacgcaggacgtgcgcaaagggtatctgcacatcagccatctctggcaggagggcgacacgctacagttaaccctgccgatgccggtgcgccgcatttacggtaacccgctggtgcgccaccaggcaggccaggtcgccgtccagcgcggtccgctggtttactgcctggagcaggcggataacggcgagcaattgcataacctgcagctgccgcgcgacgcccggtttagcgctgtcgaaggcaaagggatttttgcccgcaagatacttctccaggcgccgggctataagcaaacggcggaagatgccgaaaaccaggccctatggcactatgaccgcgcgccgtcctcccgtcagccgcaagtattaacctttattccgtggtttagctgggccaaccgcggcgaaggcgagatgcgcatctgggtgaacgaagcggaagcgtaaatgtgagtgtgagcattccccggtggcgctgcgcttaccggggcgacaaggtttgtgcgttatcgtagcccgggtaaggcgttcacgccgcgacccgggactacctgcttatgctaaaggaacaatgccttatcgcgcagaatatgatcgttgccgcgacggcgggtaaaaccgatgcggtcgaaatattcgaggatctgaatcgccagcttgcgcccgacgttcagcgtatcgcggaaatccgccgcgcaggttgagcccctttccagatccaaatcgcggatcattttggcaaacgccacaatccgatcgttgcgatagtagcgatctttcacgatcgcggtaatcatcccctgctgcgccgcctggcgtaataccgcccgcattaacgactcttctacgttggcttcacgcgccagatcgcgtacccaccatggctcatcggcaaacagcccggcaacccgctgccagatggcctgctgctcgtcggtaaagcccgctttatgctccggcagatgcagccagccgtggtggctgtgaacaatgccgctttcgcgcatctgctcaatcaacagcagcaccagcgcttcatcttccatcggcagcgcaatacgccgcaggcgttcgcggcccggtcctggctcatcgcgatgctgatcgtgatagcgcgccagggcatcgagcagcttccgctgccagcgcgcggcgagcggggcgctcagcaggctatttcccgcctgcagatagtcagggcggtgaatcagcgcgttgaggccatcgcggctgagctgacgcgcccaggcgaaatcatcgaggcgcaccgcatcgcgctgaaggtgaatatccagcgcctggacgtcatcgccctgcgcggcggccagcgcgtgcagccactgtaaatactccggcttacgcttgccccggcgcggcggattgagggtcaccactcgcgcaccggccagcgtcaggcgcgcggaaatatcgcgcagcaccagacggtcgttatccgccagccgcagcggcgtatcgagaaccagctccgccagcgcgccttcgagcagcgacacgcggccggtaatatggctggcggcgtggtggatatgcagcggctgccactggctaagcggcgtatggcactgcagttcaacgatgacccgctcagaggcttccggcggcggtaccgccagcagccagtcgccgcggttgagctcctctttttgcgcatcgccggcaatattcagggcaatgcgctggccggcccaggcctgctcaaccggctgattctgcgcgtgcaaaccgcgcacgcgcatcggtttatccacgccggtcagccacagcgtatcgccaacgttgacctcgccggataacgcggtcccggtaaccaccagccccgcgcctttgacggtaaatgcccggtcgatggccaggcgaaagcgctgatgctgcgggtgcgcgcgcgcggagagctgcaggagatgctcgcgcagctcggcgatgccccgtccttccgtcgccgcgacggcaaacagggtcgcgccggtaaagccgaactccgccagcaccgcgtcgatttccgcctccacctcctcaatccgcgccgcttctacgcggtccgctttggtcagcgccacggttagcgttggctgcccggtaagctggaggatcgccagatgttcgcgggtttgcgccatcacgccatcatcgcaggccaccaccagcagcgcgtgatcgataccgccgacgccggccagcatattggacaaaaacttttcgtggccgggaacgtcgataaaacccagcacccgcccgtcgggctgcggccagtaggcgtagccgaggtcgatagtcatcccgcgcgctttctcttccggcaggcgatcggcgttgataccggtaatcgcctgcagcagcgtggttttgccgtggtcaacgtgtccggcggtggcaataatcatctcaataacatctccataaaccgggattcatcctcaagacagcgcaggtccagccacaggcggccatcgtagatcctgccaataaccggcacgggcaactgacgccaccgtgccgccagagcttccagccgactgccgcgcccatcgcgcggagtcaacgtcaacgccgcgctgggcaagcggtccaccggcagcgagccgctgccgatctgcgacaggcatggctcgacccgcaggtcaaaatcagcataatgtgcagccagcgcggcccgcatgcgctcgccctgcaggcggatcttgtccgcctggcgagtcagcagacgcagggtcggcagttcagcggccagcttttccggatgcagatagaggcgcaacgtggcctccagcgccgcgagggtcattttatccgcccgcagggcgcgcttaagcggatggctctgcaaacgcgcgatcagcgcttttttaccgacgataattcccgcctgcgggccgcccagcagtttatcgccggagaagcttaccaggctgacgccggcggcaatcatctcctgcggcatcggctctttcggcaggccgtactggcttaaatccaccagcgagccgctgccgagatcggccaccaccgggatattgagttcgcggccaatctccgccagcgccgcttcatcgaccgctttagtaaagccctcaatactgtagttgctggtgtgcaccttcatcagcaggccggtattgtcattcaccgcctgacgataatctttcgcgtgggtgcggttagtggtcccgacttcatgcagaacgcagcccgcctggcgcatcacgtcgggaatacgaaacgcgccgccgatctccaccagctcgccgcgcgacaccaccacctcactgccgccggcggttgccgccagcatcagcagcaccgccgccgcgttattgttgacgatacaggcgtcttccgcgccggtgatctggcaaagcaggtcggccagcgcgcgatcgcggtggccgcgtccggcatcgtcaagatcgtattccagcgtcaccggcgcgcgcatcgcctgggtcaccgcctctaccgccgcttccgcctgaatcgcccgcccaaggttggtgtgcagcacggtaccggtcaggttgaacaccgggcgcagcgcgctctgctgtcgctgcgtcaaacgacgcgaggtctccattagccacgcttcgcaccagtccggcagcgtctggttcaggcggatgtattcccgcgcctcgtccagcatctgacgcagctgcgccaccgtctgggcgtgaccgtattgcatcaacagcggtgaaaatgcggggtcgcggagtaaacggtcgatggccggaagccgggtataaagcgcacgaatttcgctagtcatgaatgaacctattttcccccctcccgacgggagagggagtcaacaaatgagcagcaattgtaatgcctccgcgcaaaaactgttacctgtctgggtcaactcaccggcggttcagtgcgcgcaaagctggcgcgctgaaagagggaatccaccaggcgcaccagcttcggtcgggtggcgcaccagcccggcgcgacgcggcggaaattgagataagcaatggcgcaggctgcggaaatggttgccagattaacctcatcaggacgtaatgtcccgtcactggcatacccttccagcgcatcaagcccgcgcgcaattttttcacgctggcgcagcagttcgctttccgactgctgggccgccgggcgcgttttctcccgtaccagcgtttgcgcagcctccatcacgccatcagccagcgcttcaatttgacgcaatttcagcgcagccttcggcgccgcaggcagcatatccggcgcgatgccgagcagctccagatattgcgcaataatgggcgagtcgtaccagcattcaccgtcgtcggtgaccagcgcggggacttttcccagcggattgtactgcgccacgccgttggtctcgtggtacgggaattcgttgacgaactcgaagggaatcgctttttccagcagtatgacggaaattttgcgcacaaagggactggtgtagctgccgatcagtttcattgcctgctcctttcgccaacaaagtagtaagtatggcgcaggcgcaggcaaatagcagagagagaaatcacctcatgccggaccgaccccgctaatggtccagataaagatagtgcatccagctggtcatccgcagcagcaccttgcgcatcaccgaaacgtgggtgaaatgatcggagtagaccgccacctgggcgtaaatgccgtcaggcagggcgtctacggcggcatcgggctccagctcaatggtcgccagcacgccgtcggtgcccggcgtcaccgtcagcgcctgcagcgtgccctgcgcctggtatgttccccccggtacgactggcaggatgctcaccagcttgccgcgaaagacctgtcccggcagcgcattgaacaccgcttcagcatcgtcgcccttctccagcctgagcagcgaattttgccggaactgcgccacaatcagccgtttttgctgggggataaagaccatcaccggacgcagcggcagcgaggcggcataggtcccaggacgaattaacacctgggtgatataaccatcgctgggcgcgcgcacggtcgtctgatcgaggttatatttcgcctccgccagctgcgcgcgcaggcttaccacctgcgactgttcgccgtttatcatgctgtcgagctggctctgaatttgcgcctgctccgccaccgatcctttcaccatcgcatcctgggcgaggtagttttgccgggcattatcgatatcgctttccgaaaacggattgacccgcgcctggcttcctttcaggtagcgctgataatccttatacagacggtcgcgctccgccgaaacgcgcgtggtgttggcctgagcctcagaaagctgggctttaagggtattgatactgtgcagcgcggtaacaaggtcggcctgtagccggtccacccgcgcctgataacgcaccggatcgatggtaaacagcacctcgccctttttaactcgttgatttgctttatcagtgacgctgctgaccaccccggtaacctgcggcgtaataggaatagaaataaccgctttttgcgcggtaaaggtatacggatggttgtagttcattaataagataagcgcgctaacaataaatacgccgcccagcgccgcggtgggaaccgtccatttatttaccgggatcttaaatattttaaatatcgaccaggcaatcgccacataggtcaaaataatcagcagatccatgagttatttctccaccgaaggaggttgagctgacggtctgagaccggttatttgctgctcgagcgcgataacccgctggcgcagttcgctgatgtcgtccccctcttccgccgcctcagacggcgtctcgtcccgccgatgctgcatgccccagccgcgttctggccggtaaagcgtggcccagatccataaaaacggccaaatgacgtgcagcgtaaaaaggctcacccagcccgcgacgtgaatcgcatcggcatgcgggtgattacgtttcttcgcgatcaggtaaggaatatcatggagaatgatgattccataaaaaatcaccagaaatacaaagatcagaacgccgagcgcaaaataattgagaaacataatttcctcggatttacgctaattattttcaggatgtgtgccgggccggatgaaaaaaagggccgacaaaatgagcataattcacccgtatcattttcgccattgacgactaaaatgttctttaagcgattgcgttgctgagtgacgtatcagcaagcggaacgcggcataacctgcgcgagatcacaccgagctaaatccaggtgaaaatattttgtgatgaacatcacaaacaaataacaaaacgtcaaagtaaatttgtgattttaatcacataaaaatgcattatccccccttaaaacccggtctgttgtttttttacacatcaattttgtgatgcagatcactacaaaagaccatcatcgccctatattcatgtgatccaaatcacataaaaatccaccgactggacagcttaacgattcagtgccagatttcgcactatcactcagggcccggctacctctgccgccttattaacaacaagcctcgggctttcagcctgccgatagcaaaaacagaagaaggggtgttttatgtcatccgatatcaagatcaaagtgcaaagctttggtcgtttcctcagcaatatggtgatgccaaatatcggcgcgtttatcgcgtggggtattatcaccgcactattcattccgacaggatggttaccgaacgaaacgctggcgaagctggtcggtccgatgatcacctatctgctgccgctgctgatcggttataccggcggtaagctggttggcggcgagcgcggcggcgtggtcggcgcgattaccaccatgggcgttatcgtcggcgcggatatgccgatgttcctcggctccatgatcgccggtccgctgggcggctgggcaattaaaaaattcgacgtctgggtagacggtaagatcaaatccggttttgagatgctggtgaataacttctccgcgggcatcatcggtatgatcctcgccattctggcgttcctcggcattggcccggcggttgaagtcctgtcgaaaattctggccgcaggcgttaacttcatggtggcgcacgagatgctgccgctggcctctatctttgttgaaccggcgaaaatcctgttcctcaacaacgccattaaccacggtattttctcgccgctgggtattcagcaatcccacgagctgggcaaatccatcttcttcctgattgaagctaacccgggtccggggatgggcgtcctgctggcgtatatgttcttcggccgcggcagcgcgaaacagtctgcaggcggtgcggcaatcatccacttcctcggcggtattcacgagatttacttcccgtacgtgctgatgaacccgcgtctgattctggccgttatcctcggcgggatgaccggcgtattcaccctgactatcctcaacggcgggctggtctctccggcttctccgggttctatcctcgccgtgctggcgatgacgccgaaaggcgcttactttgctaacatcgcggcgattattgcggcgatggccgtctcctttgtggtcgcagccgtgctgctgaaaaccagcaaagttaaagaagaagatgatatcgaagccgcgacccgtcgcatgcaggatatgaaagcgcagtccaaaggcggcgccacgccgctggccgctggcgatgtcgcgaacgacctgagccacgtgcgtaaaatcatcgtcgcctgcgacgccggtatgggctccagcgcgatgggcgcaggcgtgctgcgtaaaaaagtgcaggatgccgggctgagcaacatctccgtgactaacagtgcgatcaacaacctgccgccggatgttgacctggtcatcacccaccgcgacctgaccgagcgtgcgatgcgtcaggtgccgcaggcacagcatatttcgctgaccaacttcctcgacagcggcctgtacaccagcctgaccgaacgtctggtttcggcgcagcgccacacggataacgaagagaaagtccgcgacagcctgaaagacagcttcgatgcgtctgacaccaatctgttcaaactcggcgcggaaaacatcttcctcggtcgtaaagcggcgaccaaagaagaagcgattctgtttgccggcgagcagctggtgaaaggcggctacgttgagccggaatacgtccaggcgatgctggaccgtgaaaagctgacctccacctatctgggtgagtccatcgcggtcccgcacggcactatcgaagccaaagatcgcgttctgaaaaccggcatcgtcttctgccagtacccggaaggcgtacgcttcggcgaagaagaggacgaggtggctcgcctggttatcggtattgccgcgcgtaataacgagcatatccaggtgattaccagcctgaccaacgcgctggacgatgaatcggtcattgagcgtctggcaaaaaccaccagcgttgaagaagttctgacgctgctgaaagcgtaatccgtcacccggcggtacgccgggcaacgccccctctctccttacgcgtggggagagagggttggggtgagggaaacgcctgaccccagccctctcaggtaaaaacattaattgaaggttaatactatgaaagcattacattttggcgcaggtaatatcggtcgtggctttatcggcaaactgctggcggacgcggggatacagctgacgtttgcggatgtaaatcaggtcgtgctcgatgccctgaatgcccgtcatagctaccaggttcacgtggtcggcgagaatgagcaggtcgataccgtttccggcgttgacgccgtcagcagcatcggcgacgaagttgtagagctgattgccagcgtggatctggtgaccaccgccgtcggcccggtcgtgctggaacgcatcgccccggcgattgccaaaggcctggccaaacgtaaggcgcaggggattaccgccccgctgaatatcatcgcctgcgagaacatggtccgcggcaccacccagctgaagggtcacgtttttaacgccctcgccgaagaagacaaagcctgggttgaagccaacgtcggcttcgttgattccgccgttgaccgcatcgttccgccgtcggcttccgccactcacgatccgctggaagtcaccgtggaaaccttcagcgagtggattgtcgataagacccagttcaaaggcgaactgccgaacatcccaggtatggaattaaccgataacctgatggcatttgtcgaacgtaagctattcaccttaaacaccggacatgctataaccgcctacctcggaaaactggcgggtcatcagacgattcgcgacgcgattcttgatgagcacattcgcgccgtggtcaaaggcgccatggaagagagcggcgcggtgctgatcaaacgctatgtctttgatgcgcaaaagcacgccgcttacatccagaaaattatcggtcgttttgagaacccgtatctgaaggatgacgttgagcgcgttggccgccagccgctgcgcaaactgagcgcgggcgaccgcttaattaagccgctgctcggtacgctggaatacggcctgccgcaccgcaatctggtgaaagggatcgccgctgccatgcacttccgcagcgaagaagacccgcaggcgcaggaactggcggcgctgattgccgagaaaggcccacaggccgcgctggcgcagatttcgggtctggacgcagcaagcgaggtggtggcggaagccgttaacgactataacgccaccaaatgaggcaagacctggcgcggtccgaaccgcgcccattactcatgtcagatatgcaggcaataatggaagaaacacaggcatttgaaaaccgtgtgcttgaacgtctgaatgctggcaaaaccgtaagaagcttcctgatcgccaccgttgaactgctgacggaagcggtcaatattctggtgcttcaggtattccgtaaagacgactacgcggtgaaatacgcagtggagccgttgctggacggcgacgggccgcttggcgacctttctgtacgcctgaagctgatttacggccttggggtgattagccgcgccgaatatgaagacgctgaactgctgatggccctgcgcgaagagctgaatcacgacggtaatgagtatagctttaccgacgatgagatcctcggaccgtttggcgagctgcactgcgtcgccgccctgccgcccacgccgcaatttgatgagagcgatgctgaactgctggcaatgcaaaagctgcgctaccagcaggtcgtacgttccacaatgatgctatctctgaccgagctgatttctaaaatcagcttaaaaaaagcctttcaaaaatcaacgctctgattctggctcttgctggtcgcacgtcggccgataaagctgacgataatactcaagacgccgcagaaatagcgcttctttatctgccgggatatccggcggtatatgctgcaaacgcggagatttttttagatattccataaaagcctgacttgaagccataaaatctacggctttatcaataatgcgcggtacgctgtcgcctattttcgccatcacgctctcctcttttgggggaatgatcctattaaggattagccaaaaacagggtttcagatgaggaaaacgtgctgaatggccgtcaggcttcacagaaatgaatattcgccaactctgggttaaaatgatttttatattcaataagttataatatgccgctgcggttgttatgagcaaaaaacggcgacgttttgataaataactacccacaacccaagcgacagcacatactatagtctgataacgcccctttcttaatagattaagccaccatgaaagaagtcgaaaaaaacgaaattaaacgtctgagcgatcgtcttgacgctatccatcaccagcaggccgacctgtccctggtcgacgccgcagaaaaatacgccgagctggaaaaagagaaagccaccattgagacggaactcgttcgcctgcgtgaggttcagggccagaagctgagcaaagaagcgcaaaagctgatgagcatgccgcatcgccgcgccatcaccaaaaaagagcaggccgatatgggtaagctcaagaaaagcgtacgcggtctggttgttgtccacccgatgaccgcgctgggccgcgaaatgggcctcaaagagatgaccggcttctcaaaaaccgcgttctgatatcttcatcccgtgaatctcccggctcgcgctacgcttagccgggctacgggttcacagccctctgcgagagggtagcccggacagacgcgcagcatcgcctccgggaaattcagctactctgcgctctgctccccggtcgcggctaacgccttaccggggctacgggttcaccgccgtctgcggaccggtagcccggacagatgcgcagcatcgcctccgggaaattcagctactctgcactctgctccccggtcgcggctaacgccttaccggggctacgggttcaccgccgtctgcgggccggtagcccggacagatgcgcagcatcgcctccgggacaggctctgtttcaaacgtcattccccactaattggccctaccaatgttttcttaaatcgtccaatggttcacatatccatcatttttcgtcacagacatattgctcatcaataacatttgattaaccattcgttgtcgttaatcctacaatcgcaatttggctgggccagttttacaaatgatgtgacctgctaagagcgcaagactcagcacggcatcataacggcccgatggagacctgcatgaacctctggcaacaaaattacgatccggccggcaacatctggctatcgagtcttatcgcatcgctaccgattctgtttttcttttttgccctgataaagctcaagctgaaagggtacgttgccgcgacctggaccgtgctcattgcgctctccgtcgctctgctgttctacaaaatgccggttgaccacgcgctggcctccgtcatctacggcttcttctacggcctgtggccaatcgcgtggattattatcgctgcggtcttcgtctataaaatctcggtgaaaaccgggcagttcgacattatccgctcatcgattttgtcgatcaccccggaccagcgtctgcaaatgctgattgtcggtttctccttcggcgcgttcctcgaaggggccgccggttttggcgcaccggtcgccatcaccgcagcgctgctggtggggctcggctttaacccgctgtatgcggcgggcctgtgtctgatcgttaacaccgcgccggtcgcgtttggcgcgatgggcattccgattctggtcgccggacaggtgacgggcctcgacagcttcgaaatcggccagatggttggccgtcagctgccgttcctgaccatcatcgtcctgttctggatcatggcgattatggacggctggcgcggcattaaagagacctggcctgcggtcatggtcgccggcggctcctttgctatcgctcagtacctcagctctaacttcctcggcccggagctgccggacattatctcttcgctggtatcgctggtctgtctgacgctgttcctcaaacgctggcagccggtacgcatcttccgcttcggcgatatgggcgcatcgcaggtcgatatgaacctggcccgcacgcattacacgccgggacaggtgattcgcgcctggtcgccgttcctgtttctgaccgcgacggtgaccctgtggagcgtgccgccgttcaaagcgctcttcgcccccggcggcgcgatgtacgattttgtgattaatatttccgtgccgttcctcgacaaaatggtggcccgcatgccgccggtggttagcgaagccacgccgtacgccgcggtctataagtttgactggctctccgccaccggcaccgccatcctgttcgccgcgctgctttccatcgtctggctgcgcatgaagccaaaagacgcgatctcgacctttggcagcacgctgaaagagctggcgctgccgatttactccatcggcatggtgctggcgttcgcctttatttccaactattccggtctatcctcaacgctggcgcttgcgctggcgcacaccggtcatgcatttaccttcttctcgccgttcctcggctggctgggggtatttctgaccggttcggatacctcgtctaacgcgctctttgccgcgctgcaggctacggcggcccagcagattggcgtctccgatatcctgctggtcgcagcgaacaccaccggcggcgtgaccgggaaaatgatctctccgcagtctatcgccatcgcctgtgcggcggtcggtctggtaggtaaggagtccgatctgttccgttttaccgtcaaacacagcctgattttcacctgtatggtcggtgttatcaccacgctgcaggcgtatgtcttaacctggatgatcccgtgatagtgatgccaaaacgccttgccgacgacgtcgcccgtcgtgtgcgggcgctgattgaagaacaaaagctggaggcgggcatgcgattgcccgccgaacgtcagctggcggcgcagctgggcgtatcgcgcaattcgctgcgcgaagcgctggcgatgctggtcaacgaaggggtgctgctcagccgtcgcggcggcggcaccttcgtgcgctggcagcacgaagcgtggtcggagcaaaacatcgttcaaccgctgaagacgctgctctccgacgatcccgattacagctttgatattctcgaagcccgtcacgccatcgaagccagtaccgcctggcatgcggcgatgcgggcaaccgatgccgaaaaagagaaaatccgcctctgctttgaagccacccaaagcgaagaccctgacctggcctcgcaggccgatgtccgcttccatctggcgatcgccgaagcgtcgcacaacgtggtgctgctgcaaaccatgcgcggtttttttgaccttttacagtcctcagtcaaggagagccgccagcggatgtatctcgtcccgccggtcttcgctcgcctgaccgaacagcaccaggcggtcatggaggcgattatcgccggtgacccggaaggtgccagacaggcgatgatggcccatttgggctttgttcacgccaccatcaaacgctttgatgaagaccaggcccgccaggcgcgaattacccgcctgcccggtgaccataacgaaaattccagggagaacttgtgatgattatttccgccgccagcgactaccgcgccgccgcacagcgtatcctgccaccgttcctgttccactatatcgacggcggcgcttacgccgagcacaccctgcgccgcaacgttgaggacctgtccgacgtcgcgctccgccagcgcattctacgcaatatgtcggacctgagcctggaaaccaccttattcaacgaaaagctggcgatgccaacggcgctggcgccggtggggctgtgcgggatgtacgcccgccgcggtgaagtgcaggccgccggcgcggcggatgaaaaaggtattccgtttaccctctctaccgtttccgtctgcccgattgaagaggtcgccccgaccattaagcgcccgatgtggttccagctgtacgttctgcgcgaccgcggttttatgcgcaatgcgctggagcgggcgaaggcggcgggctgttcaacgctggtctttaccgtcgatatgccgacccccggcgcgcgctatcgcgatgctcactccgggatgagcggcccgaacgcggcaatgcgccgctactggcaggcggtgacccatccgcagtgggcatgggacgtcgggttaaacggccgtccgcacgatttgggcaacatctccgcctacctcggcaagccgaccggtctggaggattatatcggctggctggcgaataacttcgatccttcgatttcctggaaagaccttgagtggatccgcgacttttgggacggtccgatggtgatcaaggggatcctcgatccggaagacgcccgcgatgcggtgcgcttcggcgctgacgggatcgtggtttccaaccacggcggccgccagctcgacggcgtgctctcttccgctcgcgctctgcccgcgattgccgacgcggttaaaggcgatatcacaattcttgccgacagcggtattcgcaacggccttgatgtggtgcggatgattgccctcggcgccgatagcgtgctgctgggccgggcttatctgtatgcgctggccacccacggcaaacagggcgtcgccaatctgctgaacctgatcgagaaagagatgaaggtggcgatgacgctgaccggcgcgaaaaccatcggcgaaatcagccgtgaatctttagtccagaacgccgatgcgctgcggacctttgatgcgatcaaagcgggaaacgcggcggttatccctgaccctcacccacagggagagggaaccgtccggcaggcgggttaacgtcctcatcaggccatccggctcacagggcggcgccggttttctcccgctctctttccgggagaggagcagggtgagggttaaccaaatatctgctattctgcccccgcaattaagggggcagcatgcttaacatcgtcttattcgaaccagaaatcccgccaaataccgggaatatcatccgcctgtgcgccaacaccggcttcaatctgcatattatcgaacccatgggttttgcctgggacgataagcgtcttcgccgcgcaggtctggattaccacgagtttgccgccgtccagcgccatggtgattacgccgcctttattgaaagcgcaaagccgcagcgcctgttcgccctgacgaccaaagggacgccggcgcacagcgcggtaagctatcaggacggcgattttctgctgtttggcccggaaacccgcggactgccgggcagcattcttgatgctctgccggcagaacaaaaaatccgtattccgatgatgccggacagccgcagcatgaacctgtcaaatgcggtgtcggtggtggtctatgaagcctggcgccagctgggctatcccggcgcggtgctgcgcagctgagctcgctttctcccggaggcggcgcgtagcgcctgtccgggctaccagacagcgctcggttttgtagcccggacagatgcgcagcatcgcctccgggaaatcaatcaaataccgtcgccgtactcgaaggtatggtgtatgccgttaaagtgctgatccatatccatcgcgggtttatcgctctccggcttgcccacaatgcgggcgggaacgcctgcggcggtagtatgcggcggcaccggctgtagcaccaccgaacccgcgccgatttttgccccgcgtccgacttcgatattgccgaggattttcgccccggcgccaatcatcaccccttcgcgaattttcggatgacgatcgccgctggttttaccggtaccgcccagggtcacggattgcagaatcgatacgtcgtcttcaatcaccgccgtttcgccgacgacgatgccggtggcgtggtccagcatgatcccgcgaccaatcttcgccgccgggtggatatccacctggaacgatacggaaacctgattttgcaggaagatcgccagcgcccgacgcccctgattccacagccagtggccgatacgataggcctgcagcgcgtggaatcctttcagatagagcagcggggtggagtatttatccaccgccgggtcgcgcgttcgcaccgcctgaatatcgcaggcggcggaggcgatcatttccgggtcggcggcgtaggcctcttccaccacttcacgaatcgcgatggcgggcatgatcggagaagccagtttattcgccagcatatagctcagggcgctgccgagattttcgtgcttgagtagcgtggcgtggtaaaaactggcgagcattggctcacagtcagctaaagcccgagcttcggctttaatattattccagacgatatccagttcttcacacggcattgctgactccagacgatataataatgaccggccagttctttgctggccgggtcattcaggtgatccaggttccatcgcagttagttgctacgctcgtccttgcgtgcacgacctaataaggtcaatgctgcctcgcgcgcaatttttccgcaatacaatacctgataaatttcctcggttattggcatttcgacgcctaaacgctgcgccagaacgcgaacctctttggtattgcgatagccttcaaccacctggccaatcttctcctgcgcgctttgcacatccatgccctgaccgagcatcatgccgaagcggcggttacgcgactggttatcggtgcaggtgagcaccagatcgcctaagcccgccatccccataaaggtctccggatcggcgcccagggcctccccgaggcgcgacatctcaaccagcccgcgggtaatcagcgcggtacgcgcgttggcgccaaagccgatgccgtcagacatgccggcgccgatagcgatgacgtttttcaccgccccgccgagctgcacgccgataaagtccgggttgatatagacgcggaagctcttgccgcagtgcagcaggctttgcaaatcgtcagcgaactgcggatccgtcgacgccagcgagatcgccgtcggcaggcctgccgccagctctttcgcgaaggtcgggccggaaatcaccgccagggggatagcgtcgcccagcgcttcacgggccacgtcctgcagcaggcgcccggtttccgcttccagacctttcgtcgcccataccaggcgagcgtcggggcgcatcagcggtttaatctgccgcagcacctggccgaaaacgtggctcggcacgacgacgaggatatcgcggctggccgccagcgcggtcgccagatcgctttccagatgcagcgtgtcggggaaaggaacgtcaggaagaaatgcggcgttgcagcggtcgtgctgcagcgtcgcaatatgtttcgggtcatggccccacagcacaacgtggtggccatttcttgccagggtgatggcaagagcggtgccgtaagagccggcaccgatcacagtcattgcagcgttaagcgcgttcatcaggcatcctgatgttgttcagcaccttcgccagcctgctgctgcagatagttcataaacagcgcatcgaagttcactggcgcaaggttcagttgcgggaaggtgccgcgggaaaccaggctggtgatgcactcacgcgcgtacgggaacagaatgttcgggcagtatgcgccgaggcagtgcgccatctgggtgccgtcgatgccttcgatggagaaaataccgccctgctgtacttcgcacaggaatgcggtttcttcgcccagagaggcggttacggtcacgcgcagcaccacttcatacacgccttcagccagctggctggaagcggtatccagatcaagtttaacttccggctgccaatctttctggaaaacttgcggcgcgttcggcgcttcaaaagaaatatctttggtgtagatgcgctgaatctggaaagtcatttcggtgctgttttgttctgacatagtaaaaccctttcgtgttgtccttaagtacgcccgtccaatggggatgagcgcaaaaattagcgcaggaggggatcgagtccaccacgtgaatcaagcgcgtacaagtcgtcacagccgccaatgtgctgcgcatcaataaaaatctgcggaaccgtcgttcgaccgctgcgctgaatcatctcttcacgcttcgcagcatcgccatcgataggcaactcgttgaacgtcacgcccttgctgttcagcagcgcttttgcacgtacgcagaacgggcaggtcgctttggtatagatatcaatattggccatgacttcactcctgtttttacccccgagagttttacgccgcaggcgttgttttcccgctgacgaatagccgccgcagggaaaaccgcgctacgccataaagacgcgggtaaattatttaccgcgtaccagcggaaggttctcgccgctccagccagcgatgccttctttcagtacgaagaccttttcaaaaccggctttgttcagcgcgctggcgggttcttgcgcctgcatacctgagccgtctaccactataatgggttgtgctttgtgcttttccaactcgccgacgttatttgctttgatatcgctcggcagcaggttaatagaacccgcaatgtggcctttacggtaatcgtcacgctgacgcaggtcgacaaccacggcatcttctttgttgatcaggcgcgtcgcttcaccgcgggtgatgactttaactttcgacatcagccctttaaaggtggtgaacagcaccgccaccagcagcgcgacccacgcgatgctcaggacggggtgacggctgatgaattgcataatttcttgcatggggggttacaactcccgactaagtgataaaaaaaccagggaaggagtatacctgtgcattgcggcaaatacagccagtgagcgcgatgtaatgtattttctgcggcccgtcacgaaaaaaaaccgctctcgccgcggcaatgcgctctggccgccctctttctttgatcttttacggtgatttgatcgattcagctgtagtaaaattacgcaaattttctgtctttgagcatgaggttgtcgcaatgtcggtttctaaaaaacctatggtactggtgattctggatggctatggctaccgtgaagaccagcaggataacgctatttacagcgccaaaacccctgttatggacgcactgtgggcgaaacgtccgcataccctgattgatgcttcaggcctggaagtcggtctgccggatcgtcaaatgggcaactccgaagtgggccacgtcaacctcggcgcgggccgtatcgtgtatcaggatctcacccgcctggacgttgaaatcaaagaacgtaccttcttcgccaacccggtactgaccggcgcggtcgataaagccgttgccgcaggcaaagccgtgcatatcatgggcctgatgtctccgggcggcgtccacagccacgaagaccacatcatggcgatggttgagctggcagccgaacgcggcgcggataaaatctatctgcacgccttcctcgacggccgcgatactccgccgcgcagcgctgaaaagacgctggcgaaattcgaagacaaatttgccgcgctgggcaaaggccgcgtcgcctcgatcgttggccgctactacgccatggaccgcgacaaccgttgggaccgcgttgagcaggcttacgatctgatgaccctggcaaaaggcgagttccaggccgataccgccgttgcgggcctgcaggccgcttatgcgcgcgatgaaaacgatgagttcgtgaaagcgaccgttattcgcgctgaaggccaggccgatgcggcgatggaagacggcgatgcgctgattttcatgaacttccgcgccgaccgcgcgcgcgaaattacccgcgccttcgttaacgccgatttcgacggcttcgcccgtaagaaagtggtgaacctcgatttcgtcatgctgaccgagtacgccgcggacattaaagtcgcctgcgcttatccgccggcatctctggtgaacaccttcggcgaatggatggcgaagaacgacaaaacccagctgcgcatctccgaaactgaaaaatacgctcacgtgaccttcttcttcaacggcggcgttgaagagccgttcaaaggcgaagagcgcattctgatcaattcaccgaaggtcgccacctacgatctgcagccggaaatgagctccgctgagctgaccgaaaaactggttgccgccatcaagggcggtcagttcgacaccatcatctgtaactacccgaatggcgatatggttggccacaccggcgtaatggaagccgccgttaaagcggtcgaagcgctggatgactgcatcgaccaggtgagcaaagccgttgaatccgttggcggacagctgctgatcaccgcagaccacggcaacgccgagcagatgcgcgatccggccaccggccaggcgcacaccgcgcacaccaacctgccggttccgctgatttacgttggcgataaaaacgtcaaagcggtcaacggcggcaaactttccgacatcgcgccgaccatgctgacgctgatgggaatggaaatcccgcaagagatgactggcaagccgctgttcatcgtggaataatccttccccatgaggggaaaggcgacgtattcaactacatggatcgcaacggcagttcgatccgtcttttacgccagcgcgcttagcgctggcgtattgctgtgcgccgcatctgctcacgccgacgatcgcgaccagcttaaatccattcaggccgatatcgccgctaaacagcgggcgattaagcagcagcagcagcagcgcgcttccctggtcgcccagctaaaagcgcaggaggaggccatctccgccgccgcgcgcaagctgcgcgaaacccaggaaacgctgaaccagctgaataagcagatcgacgaaatgaacgccgcgctggccaagctggagcgtcagcgcgcctcgcaggagcgtaacctttccgcgcagctcgacgccgcatttcgtcaggggccgcataccggcatccagatgatcctcagcggcgaagaggggcagcgtaatcagcgcctgcaggcctactttggctatctgaaccaggcgcgccaggaaaccatcgcccagctgaagaaaacccgcgaagacgtggcggtgcaaaaatcgatgctggaagagaaacagagccagcaacaaaccctggtgtacgaacagcgcgcccagcagagcaagctggagcaggcgcgcaacgaacgtaaaaagaccctcgccagcctggaatcctccattcagcaaggccagcagcagctcagcgagatgcgggctaacgaatcacgcctgcgcggccgtatcgcccaggcggcggcggcggccaaagcgcgggcggatcgcgaagcccgcgaagcgcaggatgtgcgcgatcgccagcaggaagcctcgcgtaaaggcaccacctacaaacctaccgaaagcgaacgctcgctgatgtcccgcaccggcggacttggctcaccgcgcggccaggcattctggccggttcgcggctcaattctccatcgctatggcgaacagctgcaaggtgaactacgttggaaggggatggttatcgctgcgtctgaaggcaccgaggtcaaagccgttgccgatggtcgggttattctcgccgactggctgcagggctatggcctggtggtggtcgttgaacacggcaaaggcgacatgagtctttacggctataaccaaagcgcgctggtcagcgtcggcactcaggtccgggcgggccagccgatcgctctcgtaggcagcagcggcggtcagggccgtccgtcgctctatttcgaaattcgccgccagggtcaggcggtcaatccacagccgtggttgggaagataagttttgcttcaatttcgcagaattgcactcgcggtaaccggtacgctggttatggcgtcgccggtttttgccggcaaactctccattgttatcgacgactttggctatcgtccacaaacggaaaaccaggtgctggcgctgccagcgacgatctccgttgccgtccttcctaatgcgccccacgcccgagaaatggcgaccagagcgcataatctcggccacgaggtgctcatccacctgccaatggcgccgctcagcaaacagccgctggaaaaagacaccctccgcccggatatgaacagcagcgagatagagcgcattatccgcgaagcctacggtaaggttccgtacgccgtggggctgaataaccatatgggcagcgccatgacgtcgaatctcttcggcatgcagaaggtgatgcaggcgctcgagcgctacaatctctacttcctcgatagcgtcaccatcggcaatacccaggccatgcgcgcggcgcagggcaccggcgtaaaggtgattaagcgtaaggttttcctcgacgatacccaaaacgaagcggatatccgctatcagttcagccgcgctatcgctttggcgcggcgcaacggctccgccattgctatcggccacccgcacccgacgacggtgcgcgtgctgcagcagatggtgtataacctgccgccggatatcactctggttcgcccgagcagcctgctcaacgagccgcaggtggatacctcaacgccgaacacagcgccgccgtccgttcagccgccgcgcaatccgttccgcggcgtgaaacagtgcaaatctaagcgcccgccggagccggtcaacgccagccgcttctttaccattcttagcgaaagcatcactcagagcacgctggtgcagtattaccagctgaagtggcagggctgggataagcctaccaactaaatcatccgggaatccgtgtgcttatccgccgcggattccggcttgtcctgatgggcataccaggctttaaagtatttaagaaagctgtaacaggtcgcgtaaagcccggtgaccacgccaaccttgccctttcgccacgctccgctgaacagataccacttaaagaaagcgccaatcgcgctgatcgctccgcgcgcaagagacggcctgattttctggtgtttaaccagccgcgtggtgtagctattgagcttactaaacacttcatgcagggagtagaaggtatcgtggcgcacgaatcccggtagccgggcagagtgcgtaaagccaaccacctgatcgtctaccggccgatcgttgaacctggcgacggagcgattaaacaagcgaaccgggaaatccggcgatgataccggataaatggtgcgcacctcttcacccagcacgaaccagtagcgcggcagacgccatgcgcaggcggggtccggctcatcgccggccttgagcgccagaattgccgccaccacctcgtcgtcaaggatctcatcgctgtccacacacagcacccagtcgtggcgggccagagaggtcgcataattcatctgcgtaccgtgagcggtataaggatgatggtgaacggagagaccgaactgttggcaaatctgcagcgtagcatccgtactgcctgaatcgacgacgataaattcatcagccaccctgagcagcggcggtaacacctcccgtaataagcgggatgaattacaggtcaataagcatacagaaagtttaagcataatctttatagggttaaaccatggttaaactgactgtataaacgaataggcgagaaagcgatttagaaaaagtgcggagtggattaagtatcacaaaattgtaggataactctcaaaaaagcgcccgtgggcgcttttttaccatcctgaccggggcggaattaatcccagctgagaatgactttgccagactggccggagcgcatcgcgtcaaagccctgctggaaatcatcaatgccaaagcggtgggtgatgatcggcgacagatcgagcccggactggatgagcgcggccatcttgtaccaggtttcgaacatttcgcgaccataaatccctttgataaacagccccttgaagatcaccttggtccagtcgatagacatatccgacggcggaatacccagcatggcaatacgcccgccgtggttcatggtatcgagcatggtgcggaacgccggcggcgcgccggacatctccagacccacgtcgaaaccctcggtcatgcccagctcggccatcacatcgttaaggttctctttcgccacgttcaccgcccgggtgacgcccattttgcgcgccagctccaggcgatattcgttaacgtcggtaatcacgacgttgcgcgcgccaacgtgtttcgccaccgcggcggccatcacgccgatcgggccggcgccggaaaccagcacatcttcaccgacgaggtcgaatgaaagcgcggtatgcacggcgttgccaaacggatcgaaaatcgacgccagatcgtcagagatattgtcggggattttaaaggcgttaaacgccgggatcaccagatattcggcaaaacagcccggacggttgacgccgacgcccgtcgtattgcggcacaaatgcgtacgcccggcgcggcagttacggcagtggccgcaggtgatatgcccttcgccggaaacgcggtcgcccagcttaaagccgcgaacctcctgaccgatacccaccacttcgccgacgtattcatgccccaccaccatcggaaccggaatggtcttttgcgaccactcgtcccagttgtagatatgcacgtcggtaccgcaaatcgcggtcttgcgaattttaatcagcagatcgttgtggccgacttccggttccggtacgtcggtcatccagatgccttcttccgcctttagtttggataacgctttcatctcacaccctcaggcaatgacgcccagttgtttaccgatgcgggtaaaggcttccaccgcacgttcaatttgttcaggggtatgcgccgcagacatctgggtacggatacgcgcctggccttttggtaccaccgggtagaagaatccggtgacgtaaataccttctttttgcagctcgcgcgcgaactgctgcgccacggtggcttcaccgagcatcaccgggataatggcgtgatcggcgcccgcaagggtaaatcctgccgcggtcattttttcacggaacaggcgcgcgttagcccacaggcggtcgcgcagctcgctgcccgcttccaccatctccagcactttgatggaggcggcgacaatcgccggcgccagcgagttggagaacagatacggacgcgagcgctggcgcagccactcgacgacttctttgcgcgcggcggtatagccgccggacgcgccgcccagcgctttacccagcgtaccggtgataatgtcgacgcggcccatcacgtcgcagtactcatgggagccgcggccgttttcacccacaaaacccacggcgtgcgaatcatcgaccatcaccagcgcgtcgtatttatccgccagatcgcagacgcccttcaggttggcgatcaccccgtccatggagaacacgccgtcggtggcgatcagcacatggcgcgcgccggcttcacgcgcctctttcagacgggcttccagctcctgcatatcgttgttggcatagcggaagcgcttcgctttacacaggcgcacgccgtcgatgatcgacgcgtggttcagggcatcggagataatcgcgtcctctgcgccgagcagggtttcaaacaggccgccgttggcgtcgaagcaggaggagtacagaatcgcatcctccataccgagaaaatcggccagcttcttctcaagcgctttgtggctgtcctgggtaccgcagataaagcgcacggaggccatgccgaagccgtggctgtccatcccgcttttcgcggcggcaatcagttccgggtggttcgcgaggccgagatagttattggcgcagaagttaatgacctggctgccgccgacggtgatatccgcctgctgcgccgaagtgataatccgttcttctttaaacaacccttccgcgcgcgcggtatccaggtcattggttaactgtttgtagaaatccccacgcattgcaactctccagattcggcaaaatttggcacatattacctaaagctatacgctgatacgagatgatgcattactgcatgaattatttgcagcataaatcacgagtccctctctaccttatcggcgaatggctgaagcctttccgatgtagtgatatgataggagtattcatgtccggattgtctctggactaccaacttcaaaggttacagttatgatcatcgttaccggcggcgcaggctttatcggcagcaatatcgttaaagcgctgaatgaccagggtattaccgacattctggtcgtagataatctgaaagacgggaccaaattcatcaatctggtggatttgaacattgccgactacatggataaagaagactttctgatccagattatggcgggcgaagagttcggcgatatcgacgctattttccatgaaggcgcctgctcttccaccacggagtgggacggcaagtacatgatggataacaactatcagtattccaaagaggtactgcactactgtctggagcgtgaaatcccgttcctgtacgcctcttccgcagcgacctacggcggccgcaccagcgactttattgaatcccgcgaatacgagcagccgctcaacgtttacggctactccaagtttctgtttgatgaatacgtccgtcagatcctgccggaagcgaactcgcagattgtcggcttccgctatttcaacgtctacgggccgcgcgaaggccataaaggcagcatggccagcgtcgctttccatctgaacacccagctgaataatggcgaaagtccgaaattgttcgaaggcagcgacggcttcaagcgcgacttcgtctacgtcggcgacgtcgcggcggtgaacctgtggttctgggaaaacggcgtttccggcatcttcaacctcggcaccgggcgcgcggagtctttccaggccgttgcagacgcaacgctggcttatcaccagaaaggcagcatcgagtacattccgttcccggataaactcaaaggccgctatcaggcgtttacccaggcggatctgactaacctgcgcgcagcgggctacgataaaccgtttaagaccgttgccgaaggcgtaacggaatatatggcctggctcaatcgcgacaatcatgcgaattcataaaatcattcgagcggtatcaaggcggcaactcagtgattctccgggagctgactaaaatcagtgaccggagggaacgcaggcagccaacgcagagacagcttgaaggatggaatgaatgaaaatattggtggttggcccgtcatgggtgggcgacatgatgatgtcgcaaagtctttaccgtacgctcagggcgcgctatccccaggcgataatcgacgtgatggcgcccgcatggtgccgtccgctgctatcgcgcatgccggaagtcaacgaagcgatcccgatgccgctcggccacggcgcgctggaaatcggtgaaaggcgtaagcttgggcacagcctgcgcgaacgtcgctacgatcgcgctttcgtgctgcccaactcgtttaaatcggccctcgtgccgttctttgcgggaataccgcatcgcacaggctggctcggcgagatgcgctacggcctgctgaacgatgcccgtaagctggataaagacgcctggccgctgatggtcgaacgctacgtcggtctcgcatacgataaaggcgtgatgcgctgcgcgaaagatctgccgcagccgctgctctggccgcagctgcaggtgcatgaaggcgaaaaatcgcaggcctgcagcgcgtttaatctctcagccgagcgcccgattatcggcttctgccccggcgcagagttcggcccggcaaaacgctggccgcactatcactacgccgagctggcgaaacagctgatcgacgaaggctttcagatcgtactgtttggctccgcgaaagaccacgaagcgggcaatgaaatcctcgccgcgctcacgaccgaacagcaggcatggtgccgcaatctggccggcgaaacccagcttgagcaggccgttattctgatcgccgcctgtaaagcggtagtcagcaacgattccggcctgatgcacgtcgccgcggcgctggaccgtccgctggtggcgctctacgggcccagcagcccggacttcactccaccgctgtcgcacaaagcgcgcgtgatccgcctgatcagcggctaccacaaagtgcgtaaaggcgacgccgccgaaggctatcatcagagtttgatcgacattacgccgcagcgcgtactggaagaattaaacgacctgctgctggaaaaaacggaacaagaggaagcctgacggatgcgggtactgatcgtaaaaacctcgtccatgggcgacgtgctgcacacgctgcccgcgctgagcgacgccgcgctggcctttcccggcattcgtttcgactgggtggttgaagaaggcttcgcgcagatcccttcctggcatgagagcgtcgaccgggtcatcccggtggcgattcgccgctggcgtaaggcgtggttttccgcgccgatcaaagccgagcgcaaggcgttccgcgaggccgtgcgcgcggaaaagtacgacgctatcatcgatgcccaggggctggtgaagagcgccgcgctggtcacccgactggcccgcggcgtgaagcacggtatggactggcagaccgcccgcgagccgctggcgagcctgttttacaaccggcgtcaccatatcgctaaacagcagcacgccgttgagcgcacccgcgagctgtttgcgaaaagcctcggctacgcgaagccggaaacccagggcgactacgcgatcgcccgccattttttgcgtcaggctgacccgtccgctgcgccgtatctggtgttccttcacgccacgacgcgcgatgataaacactggccggaagagaactggcgggcgcttatcgccctgcttgccgacagcggcatacgcatcaaactgccgtggggcgccccccatgaagaggcgcgggccggacgcctggcggaagggcacgattttgtcgacgtcctgccgcgcatgagcctggagcaggtagcccaggtgctggccggcgcgcgcggggtcgtttccgtcgacacggggctgagccacctcaccgccgcgctcgataaaccgaacttcacgctgtacggcccgaccgatccggggctaattggcggctatggtaaaaatcagcacgtggtgcgcccggaaagcggcagcagcacgggcgatattcccgcgtcccgggttcggcaactgttgaaatctcaggaactggcttaatgggttcattatttaagcagatctatcgctacacgcatcgacgcgcctttcgccataacgaaaatctctggccgtttacccatatcacgcgcgcggcgagcggcgaaatccgcaccctgaaatacaaagggaaagcggttccgctggtcaatctcagcgaactgaaggatagcgctcagggcgaggtgctgctgaccgccaccggcccctctacgcgccgcatcgattttacgctgctgccgaaaagtattccggtgatgggggtgaacggcgcctggcatctctctgataaaattaacttttcgctctataccatcgtggatatggagttttacgataaaaaaccggacgtgatccgttcggtgattagccaggctgacattgtgctcttcaccaccatgcacggtatcgccaaaatcctcgaccgccacggcgcagagcttcgctgtcgtttggcattaattgaagacgcctgttataaaatttatcagcctaaagtcgccaaaaacgcgatacagcaggcctggcgcggcgtccccgcgctacgctttcatccgcaaaggcaggatatttgctttagcaccgacattcgtcacggcattttcgatgccggaaccgtggtctactgggcactgcaaattctgatgtggctgggatttaaaaccattctgataagcgggctggatatgagtaatttcaaccagccgcgattctacgaaacggaacaggataaactcccctcctggctggcaaataaggtggatgacctggtcatgccgtccttttcgcacgctgccaacgtgctgcaacaaaaccatattcgggtcgtcaacttctcgttagaaagcgcggttccggaaacgattttcgaaaaggtttcttttgatgagtactttaaaaataagtaattacgccagacagggctacaccgttttcttcactttgtttctgttttttagcgctattttctgcgtatcaacccggacaaataacctccttcatttatctattttgctctttttgctttcactgcttaacaaagacaatcgtcaggcaatagcggaaagcatccgccagcggtggccggtttatagcctgctggtcgtattctgcgtgtactatgcgctgagcaatatttgggggcagacgccacagcatatcgattcccctctgacccacggcacctatttaattttctatcttctgctgctgacaacgctacttggccatccccggacccgacatctggcgctgctgagcgtcgtggccgggatcacagtgctctccgtctggacgatggcgatcgacttcacgctggtcctcaaggaacgcctggtttcgccggagaatcccggcccgaccaacgtgatcgacctggcgggctattgcggtatcggtatccttatttgcgcgatgctgctgaaggagaaaggcagccacctgctgtatgtgccgatggccatcatgctggtgatgctgtttctgacccaaagccgcggcccgattatcgcgctgctggtggcgtttgtttgcaccctgcacctgcacgtctttacccgccgcaaccttctgattgtcgccgcgttagcgttggttctgggcgcgcttttcttctttacgccaacgggagacctgctgctggcgcgctttgaagagctgggcacccaaagcggattgcgcttgagtatctggcaccatacggtccaggaagtggccagccagccgtggctgggtcggggctttgactacgagctgaactttaccaactacagcggcgagcatatcactaccacccacagcgtctatcttggcgcactgttgaaaggcggcataatcggcctggcgctgctgctggcggtgattgccggagggttatggcaggcatggcgcaaacagcaggatggccgctacgggctggcgatttttatctatgcgctgatttttatggcctcgcagggcatgtttatcatcagcaaccctcgcgaaagctggccgctgttttggctgccgctgggcatcgcgctgagcggcagcctgaaggcgaaacgctaagagaagggcccgcagcgggcccttttttatgcctgctggcgagcggcgatcagggcatccgcctgcgctttgatcgccggccagaccgcgtcaatggtcatgtcggcgacgttagtctcttcgcagacaatttgtctggccttgtcataacccggtgcccaaatggtatagcccggcaaaccggtatctttgagtttacgtttgttgtaaaccgccaccatgggcttgtcgaacgcgcgagcaatatgcacgatggcggtatccgccgtaatcaccagatcgcagtggcgaacaatctcaaccgctgaattaatattgctatctggcagatgcagcgccgtttccagattaagctgacgaattttctcgctatgcccgaccatcacgacgctgattttataagggagcgtatataagcgttcaatcagagcagaaacctgatgacggcaaaagtctttatccgttgaggcggtaaacgggtttatggcaatacagagctgactccccttgtgctgagccagcagtgttttgactctttcccgctcaaaagcatcaccgggcagatgatagtggtaatgagggtgttctatgccaaatagcctggcgacggctttatagcgcgcggaaatatggctgctgctatccagaaaagggatggagtgatcgtaaagcttatattcttgtttattaaaaccgataacgcagccagggcgtaaatcagccagcagtttaaaacgctcgtaggttttcacgtcatcaaaatcaacgaccgcgtcaaatcctgccgcacgcagtgcgtttaacggcatccgcggctgatataaataaacctgctcaagaaaatccgcaccggcaagcatctgcttacaaaccggcccggtaagaaccgaaaccttatagccccggtcagctaaaagctttgcgcagccggtcgttacgaccatatccccaactttgtcatccaggcgcaataataaaacatgctgaatcttcgcggaattaaagggctggcgtgcgcttttatttctgtaacgatagttaattaaattaaacttaatttcgcggaagaaggcatttttcttccgcgtaaactgcttcacgatacgcatacggtacctggttgtgatcttttatcgctgtgtgagtttctgttggtagtactccgccaacgtcattcccttcacctgcggcgccagccagctgaaaaaagcgtccagatcggcatataagcgctcgatatcctgctcgtttttaaacgttgggctgccgccgggcatgtactctgaagagtggagcatatattcgacgtagtcattaccctgagtcaatgtttgttcgaccacttttttcatcgtctcaacgttgccgcccatcggacgcagccagtgtaccgacggcgagcgtactttgccgcgcaggcgatcgtagccctgcttcaggctattcatccacgcggaatgcttgtactgaatgctcatcggcacttccagcagcgatgattgcccttcacgacggatatcattctcgtcaagaaaataggcgtgctgcgggaaatcacggtaatcggtaccgccgtcgccctgcggcgcgcctttcgccgtcttccagttcaccctcggggtaaccgagcaatccaccagatagccatactccaccagcagacgcgcgtagcgctcgtcaaacgcccagcgcccggcgcgatggctgaccattttggtctggaaggtatcctccagcagacgggtcatatagtcgacttttgcccgcatcgccgcatcgctgtactcgatcaaatacggtttatgtcgccagtcgtcatcggtgagcggatcggtcggcgggctgttccacgcgtggagatgcataccgatttccgcggttccccgggcgatcgcatctttggcaaattcgatataaaccgggtcgatggccatttcatagttggtcaaccagaccggtttaaaaccatacttttcgcaaagctgctgaaaacgcggtagatagcgcgcattctcggtggtgatgctgtcatgtttttgccagaggttatcaccctctgtatcaatcgtgatgagaaatgcgggtttgtgcacgaaaacgtcctcaggccatacgtatcgggtcatggtagagcaagacaaggcttctctcaatctatctgatcccctagaatcggagccctgcccctgaatgaagaatagagaatgacgcctgaaacccgcacttccggccgcgtgaacccggcgcgaatcctggttattaagcttcgccatcatggcgatatgttattgataacgccgcttattcacgcgcttaagcagcaatatcccgccgccagcgtggatgtgctgctttatgaagaaacccgggatatgctcgcagcgaatacggatatccgccacatttacggcattgaccggcgctggaaaaaacagggcgccggccatcagctgaagatggagtggcagctgattcgcacgctccgccagcagcgctacgatatggtgctcaatcttgccgatcagtggcccagcgcgatcatcaccaaactgaccggggcggccatccgtatcggctttgactttccgaagcgtcgccacccggcctggcgtttttgccataccgccctcgcctcaaccgagcggcataaccagctgcataccgtgcagcagaatctgtcgattctggcgccgcttgggctggatattgctgacgcgccggcgacgatgggctacagcgagcaggactggcgcgccagccgcgcgctgctgccggcaggatttcaggataactatatcgtcattcagccaacctcccgctggttctttaagtgctggcgcgaagggcggatgagcgccctgataaacgcgctttctgaagcaggctacccggtcgtgctgacctccggccctgacgccagagagaagcagatgatcgacaccattatggcgggctgccccaatgctcgcctgcactccctcgccgggctgctcaccctgcgccagctggcgtccgtcatcgaccatgcccgcctgtttatcggcgttgactccgtgccgatgcatatggccgccgcgctcggtacgccgctggtggcgctattcggcccctccaagctcaccttctggcgtccatggcaggcgcagggcgaggtgatttgggcgggtgatttcggatcgattcccgatcctgacgacattgataccaacaccaacgaacgctttctcgatttaatccccaccgacgcggttatcgcggcggcgaaaaaggtactggcatgagtaaattcaggctggctctggtacgccagaagtatcgcccggacggcggcgcggagcgctttgtctcccgcgcgctggaagccctcgacgacagcgatcttgaactgaacgtcatcacccgcgaatggcaggggccggtgaagcccgagtggaacatccacatctgcaatccgcgcaaatgggggcggatcagccgcgagcgaggatttgccgacgccgcccgccagctatggcagcgcgaagccttcgatctggtgcaaagccacgagcgtatccccggctgcgacctgtaccgcgccggagacggcgtgcaccgccgctggctgcagcagcgctcgcgcattttgcccggctggaaaagccgcctgctgtttgccgaccgctaccatcgctatgtgatgcaggccgagcgcgacatgtaccaggacgcgcacctgcgcggcgttatctgcaacgcggagatgattaaacgcgagattattgaagacttcggcctgccggcggaaaaaatccacgttatctataacgctatcgataaccagcgttttctgccgccgacggaagaagcctttgtcgcgctgcgcgccaaatggaatctgccgcgccaggcgacctgcctgatctacgtcggctccggctttgagcgcaaggggctggatgcggcgatccgcgccatcgcgccgaccaaccgctacctgctggtggtgggcaaagataaagagcagggccgctatcagcagctggcgaaaacgctgaactgcgaggagcgggtgcgcttcttcggcatgcaatcggaaaccctgccgttctatcagatggccgacggcctgctgctgccgacgctgtacgatccgtttcccaacgtcattctcgaagcgatggcctgcggcctgccggtgattacgactaccggctgcggcggcgcggagtttattgttcagggcagcaatggctacgtttgcgatgcgctggatatcccggccctgcaggagtcggttatcgccctgcccgcccgggcgttaggctctgcgcaaggcgaacgcgcccgcgagcgcatcatgacctgcaccagcgaacgtctctcggcgcagctgctctccctctatcaggatttggtgaaataacgatgcgcatactgtttgttatcgacggcctgcccggcggcggcgcggaaaaagtcgtgctgacgctggcagcgcattttctcagccagggtgaacaggtatcgcttttttccctgcgcgacgtctgcgattatccgctgccggaagggctggattatcaggtcatcgccgatcgctgccgcaagccgtggcgcaagctgacggagctgtcccggcgcgcgcgccagcttgatgcggcaatcgagaaagcagaacagcagggccgtttcgatctggtgctctcgaatctgcataaaaccgaccgcattgtctcccgcagccgcctgctgaacgggcgcaacgtctggttttgcctgcacggcgtgttctccgcgtcctatctcggacaccgcagcggttttgaccgctggctgaaacagcagaaaatcgggcgcgtttaccagggacgcaacgtcgtcgccgtctccgatgcggtaggtcaagacctggtcgagcagttcgctattcgcccggcccagctgaaaaccatctataacccgtttgatatccccgcgctgcgcgccgcggctgaagagcccagccagcgccccgacggcgactatattatccacgtgggccgctttcatcccggtaaacgccacgaccgcctgattgaggcgtatgcgcaaagcggtatcgatgcgccgctggtactgctggggcagggaaaaccggaacaagaacagcgcctgcgccagctggcgcagcagctacaggttgccgatcgcgtcctgtttaagggcttccagaaaaacccgctgccgtggattaaaggcgcgcggatgctggtcctcagctccgatagcgaaggctttggcaacgtggtggttgaggcgctgctgctggatacgccggtcgccagcacccgctgcccgggcggcgtgaccgagatcctcaccggcgagctgtcgcgtggcctggcggatctcaacagcccggcgctggctcagacgatgcaaagcatttaccatagcccgccggccatcgacgcagcggcgctggagaagttcagcgtggcatcgatttgtcagcagtatcgtcagctgcgcagcgcctgacgccgttattcaaccaggatcgaatgagttatgagtcaaacgcctttactaagcatcgtagccgccgtctataacggcgaaaaattccttgcgcaattctttgagtgccttgagcaacagcagctggaaagctatgaactgatcctggtgaacgacgggtcgacggacggtagccttgcggttatcgaccagtggaaagagcgcctgcaaaacgtgctcgtgctggagcaggaaaaccagggcgtgtcggtggcgcgcaataccggcctcgccgcggcgacgggtaagtacctgaccttcccggatatcgacgataagctttacccgggcatgtaccgtacgcttctggagatggcggaaaagggcaatctagacgtcgccacctgcaacggccgctacgtctacgagacgaaaaaagatatccatcctattttcccgctggaccggctacagtcgaccggcgttttgcccggccacgtctggttaaagcaggcgctggattctcgtaagttcctgcatgtcacctggctgaatatctaccgccgggagtttatcgccagccaccgcttccactttgagcctggcctgcgccatcaggatattccctggaccaccgaagtgctgctggcggcagagcgcgtgcagtacaccagcgagcagttctacgattactatattcactcggaatcggtgtcgcataagccggacaacgacgacacgctgatgcgttcagcgcgccactatatgaagattcttgagatgctggacgccatcaaccagcgttatccggacaaggttcgcgatatttccgcctgccgctggcagatcgccaaagaggggctgggaattattcataccttcgatagcatgaaagatgagtcaaaaaagcatattatcattaaagagttctttgaccgcggtatctggcgcctgatctggaaaaacgcccgtacgttccgtctacgctggcgtcttggacgccgctatctgcgcatcaagcgctatcgcgacgcggcttaatactgaatcccttagtttccgccaaagagatagctttacgcgggttaaatgcttagaatttgcccgcaaaaacataaatacggataaatcgcttggaattgctttataccgccctactttacctcattcagccgctggtgtggctgcgactgctgttacgcagccgtaaggcccctgcctatcgtaaacgctggaaggaacgttatggcttctgccagaacaaggtagaaccgggtggcatcctgctgcattccgtttccgtaggtgaaacgctggcggcgattccgctggtgcgcgcgctacgccaccgttacccctatctgccgatcaccgtcaccaccatgacgccaaccggctctgaacgcgccatgtccgctttcggcaaagacgtgcatcacgtctatctgccttacgatctgcccggcgcgatgaaccgtttcttcaataccgttcagccgaagctggttatcgtcatggaaaccgaactgtggccgaacatggtcgccacgctgcataagcgtaaaatcccgctggtaatcgccaacgcccgcctctccgaacgctcggcgaaaggctatgccaaactggggaaatttatgcgtcggctgctgagccgcattacccttatcgccgcgcagaatgaagaagacgccagccgctttatcgctcttggcctgaaacgcaatcagctggcggtcaccggcagcctgaagtttgatatttcggtcacgccagagctggcggctcgcgccatcaccctgcgccgccagtgggctccgcaccgccaggtatggattgccaccagcacccacgacggcgaagaacaaattattcttcaggcgcataagcagctgctggagcgtttccccaacctgctgctgatccttgtccctcgccatccggagcgcttcggcgacgcccgcgagatggtgcagaaagcgggaatgagctacaccctgcgcagcaccggcgaaatcccgtcgaacagtacccaggtggtgattggcgataccatgggcgagctgatgctgctgtacggcattgccgacctcgcgtttgtcggcggtagcctggtggagcgcggcggccataacccgctggagcccgccgcccatgcgataccggtactgatgggtccgcacacgttcaacttcaaagatatctgcgccaagctgcagcaggacgatggactgattaccgtcaccgacgccgactcgctggtaacgcaggtgtctaacctgctgaccgatgaagattaccgtctgtggtacggtcgccatgcggtggaagttctgcaccaaaaccagggcgcgctctcccgtctgctacagttattgcaaccctatctgccgcagcggagccactaatgtcgcctcgactctcggtcgtgatgatcgccaaaaacgcggcggatctgctgcctgattgtctggcgtcggtaagctgggccgatgagatagtgctgctggattccggcagcagcgacaacaccgtcgaactcgcccgcagccagggcgttcaggtgcatgtcaatcgcgactggcagggctacggtattcagcgccagcgcgcccaggcctacgccaccggcgactacgtgctgatgatcgataccgacgagcgcgtcactccggagcttgcgcagtctatccgcagcgtgctggccgcgccgcaaaccggcgcgatatacagcatcgcccggcgcaactatttccttggccgctttatgcgccacagcggctggtaccccgaccgcgtgatgcgcctgtacgaacgcgaccgttaccgctataacgataatctggtccacgaatctctcgacgcccagggcgcgcgggttatcgaactcgcgggcgacctgctgcatctgacctgccgtgatttctccggctttcagcaaaagcagctggcctacgccgccgcctgggcgcaggagcgccatcagagaggcaaaaagacctcgctggccgctatcttcggccatacgctgggcgcctttgtgaaaacgctgctgctgcgcgggggcattctggatgggaaacaaggttggctgctggcggtggtcaacgcgcaatacacgtttaataaatacaccgagctgtgggccctgagccgcggctactcggagaaagtgtgattatgagcacaaaagcgatctatccgggaaccttcgaccctatcaccaacggccatatcgatatcgtcacccgcgcggccagcatgttcgataaggtgctgctggctatcgccgccagcccgagcaaaaagccgatgttcactctcgacgaacgcatcgcgctggccacccaggcaacggcgcatctggtcaacgttgaggttattggcttcagcgatttaatggccaattttgcccgcgcgcagcaggcgaatattttaattcgcggcctgcgggcggtggcggattttgaatatgagatgcagctggcgcatatgaaccgtcatttgatgccgacgctggagagcgtgtttctgatgccgtgcaaagagtggtcgtttatctcctcttcgctggtgaaagaagtggcgcgccaccagggcgacgtatctcactttctgccggcaaacgttcaccaggcgctgctgaagaagctgtaatcctgcgccatcggggctcttcccggaggcgatgctgcgcatctgtccgggctaccggaccaagcacagccctgtagcccggctaagcgcagcgcaagccgggttcaccgcagccaccgcatattacttctggcactggcgacaataaaacgtcgcccgctgggcgtgtttactgccgataaccggcgtcccgcaaatgcggcacggctcgcccttgcggccatacacctgcagctcctgggcaaagtagcccggtttaccgtcgctttgcaggaaatctttcagcgtcgtcccgccctgttcgatggatcgcagcaggaccagcttaatcactttcaccagctgctcgcactcctcgcgcgacagcgaagaagccagcctgtcggggtgaatacccgccgaaaagagcgattcgctggcgtagatattgcccaccccgaccaccagcttattatccattagccagggcttaatcgcggtttttttcttcgcgcacttcgcctgcagataatcggcgttgaactcatcgctcagcggctccggccccagatgcgccagcaccggatgcccttccagcgctttggtccacagccaggcgccaaaacgacgcgggtcggtatagcgcagcaccttgccgttactcatcaccaggtccacgtgatcgtgtttttccgcgggcagctcttcgctcaggatacgcaggcttcccgacatcccaaggtggacgataatccagccgtcgggcagttccagcagcagatatttagcgcggcggcgtacgctgagcaccggaacgtcgctcagacgatagatctcttcggagaccggccaacgcaggcgcccgttgcgcacaacggcgtgcaggatggtggctcccaccaggtgcggctcaatgccgcggcggctggtttctacttcaggtaattcaggcattcttttctcgaacaaaaacggcaggatgcactatcttaccgcgttcagcgacgaggttcagggcaattattgttcagcatgctcttccgcctggcgcagggggtaaacgttcgccagcgccaacggtgtagacggtagcgtagtcttgataacaaaaaaccccgccgaggcggggtttttctttacaaggaatctaaaattatttgattttagcttctttgtataaaacgtgctgacggacaactggatcgaactttttcagttccagtttttccggcttagtacgtttgttcttcgtggtggtatagaagtgaccagtaccagcagaagaaaccagcttgattttctcacgaatacctttagccatgacttatttcctctaagtacttagtacttttcgccacgggcacgcagttcggacagaactgtatcgatgcctttcttatcaataacacgcatacctttagcagatacgcgcagggtgacaaaacgcttctcgctctcaacccagaaacggtgagagtgcaggttcggcaggaaacggcgtttagtcgcgttcagtgcgtgggaacggttgttaccggtcaccggacgcttgccagtaacttggcagactcgggacatgtctattctccaaaaatcaaattagctcgagcttcgtatggggtattggcgcctcgtcaggctttacagcccggtcatcgcagttctaagcgaactctcgattgccaggcccaaatgccaaacccgagattctcaaaggtggcgtagtatacgctgactcggcgatgtgctcaagtcccgaacagacaaagatcccgatggatcgcgcgatcggggctaaatccagccgcgttcagcaaaagatacgtacgctccgcggccaataacaaggtgatccagcacacgtatatccatgaatcgacaacattttatcactctttcggtaatcaacctgtcggccttgctcggctcaggactaccggatggatgattatgtgccaggatcaccgcggcggcgttcactttgatggcttcgcgtacgatttctcgcggatgcacctcaacgtggctaagagtaccagaaaaaaggcggctatgtttcaatacccggttctgattatctaaaaagatcaccatgaagatctcacgctcttcgtcggccagctggctttgcagaaattcccgcgtcatcgacggggtaaccagcgagggttcttccgtcattcgcaggctaaaatagcgtcgcgccagttcagcaatcccttttagctgcgcatatttcgccagaccaatgccttccacctcagcaaactgcgactcttccgccgatagcaggccgtacagcgagccaaaacgctgtagcagctcccgcgaaaatgtcatcacgtcctgcgtgcgggtaccggtacgtaaaaatagcgccaacagctcaatatccgacaaaacttcgataccgtagcgctgcatcttttccctcggcatgagggattcttgtatttccatcgcggcatctccttcccactgcgcgctatcctggcacagcctttttgcgccgccgagatgcaagttttatccctgcgtagcgcctcgcaaagtgtatctccgcgaggcacacgatgccgtcaggattgtgataagatgcgcgaattctggtgtaccgcaacaggaaaaaatcatgatgagtctggctggtaaaaagatcgttcttggcgtgagcggcggcattgctgcctataaaacgccggaactggtgcgccgcctgcgtgaccgcggcgcggatgtccgcgtcgccatgacggaagccgcaaaagccttcattacgccattaagtctacaggcggtatccggttatccggtttccgacagcctgctcgacccggccgccgaagcggcgatgggccatattgagctggggaaatgggccgacctggtcattcttgcccccgccaccgccgacctaatcgctcgcgtcgcggcagggatggccaacgatctcgtttcgacgatttgtctcgctacgccgtcgccggtcgccgtcgtgcccgccatgaatcagcagatgtatcgcgccgccgccactcagcataatctggacgtcattgccgcccgcggtctgctggtctggggcccggacagcggcagccaggcctgcggcgatgttggcccggggcggatgctggacccgctgaccattgtggatatggccgcgcagcatttctcgcctgtcaaagatttgcaacatctgaacatcatgattaccgcgggccccacccgcgagccgctggatccggtgcgttatatcaccaatcacagttctggtaagatgggcttcgcgattgccgccgccgccgcgcgccgcggggcgaacgtcacgctggtgagcggcccggtttcgctgcctacgccgccgtttgtacacagaattgatgtcaccaccgcgctggaaatggaagccgcggtgcaaaacagcgcgcctcagcagcatatttttattggttgtgcggcggtcgctgactaccgtgcggtcgccatcgccgaagaaaaaatcaaaaaacaaggtgatgaattaaccctgaaaatggttaaaaatccggatatcgtcgcaggggtcgccgcgcttaaggccaaccgcccttacgtcgttgggtttgccgccgaaacaaataatgtggaagaatacgcacggcaaaagcgagcccgcaaaaatcttgatctgatttgcgccaatgatgtttctcagccaaatcagggatttaacagcgacagcaatgcattacaccttttctggcaggagggagataagcgcttaccacttgagcgcaaggaactcctgggccaattattactcgacgagatcgttacccgttatgatgaaaaaaatcgacgttaagattctggacccgcgtgttggtcagcaatttccgctgccgacctatgccacctccggctccgccggacttgacctgcgagcctgtctcgatgacgccgtagagctggctcctggcgcaacgaccctcgtgccaaccggcctggcgattcatattgccgatccctctctggcggcggtgattctgccgcgctccggactgggccataagcacggcgtcgtactgggtaacctggtcggtctgattgattctgactatcagggccagctgatggtttccgtctggaaccgcagccagcagagcttcagcatcgaacccggcgagcgtatcgcgcaaatggtgtttgtgcccgttgtgcaggcagaatttaacctggtggaagattttgacgccaccgatcgcggcgaaggcggcttcggtcactcagggcgtcaataagcccggcgatagacaaaactctttcggggcgctgccggcaaaagggctgcctgaaggatgaagtggaaccagcatcgcaaagcgcactaatgcaataacatcaccgcaggcaacagcttgcggtcgctttgtgggtgcctgcctgacaagtgctttttttcaggggtattttaaaacatggcagaaaaacaaactgcgaaaaggaatcgtcgcgaagaaatacttcaatctctggcgctaatgcttgaatccagcgatggaagtcagcgcattaccacagcgaaactggcggcgtccgttggcgtatccgaagcggctctgtatcggcacttcccgagcaagacccgcatgtttgacagcctgattgaatttatcgaagacagcctgattacgcgcatcaatttgattttaaaagatgaaaaagacacctcagcgcgcctgcgtctgattgtgctgttgattcttgggtttggcgagcgtaatcctgggctgacaagaattctgaccggccatgcgctgatgtttgaacaggaccggcttcaggaccgcatcaatcagctgttcgagcgcattgaagttcagctgcgtcaggtgttgcgtgaaaagaaaatgcgcgaaggcgaaggctataccgtcgatgaagccctgctggccagccagctgttggcattctgcgaagggatgctatcgcgctttgtgcgcagcgagtttaaatatcgcccgacggacgattttgacgcccgctggccgctggtcgccgcccagctgaaataattctcgccggtctctgtgcagcccgaagggctgcatctcttcccgcaggaattcccggcattatccgcattgatacccaggcgctcttctcgccgcggctggccgttttgccagcaatcgacccgacagaccgttgcccgccgggcagatgtttatacgccgtacgcttcgcgataggcgcgaacggcagtcaggtgttcagccatttccggcttctcttccagatagctaatcaggtctttcagcgtcacgatggaaattactttacagccgtagtcgcgctcaacttcctgaatcgcggagatttcgccgcgtccgcgttcctgacgatccagagagatcagtacgccggccagctcagcgccgttggcctgaataatttccatcgattcccgaatcgcggtgcctgcggtaataacatcatccaccagcatgacgcggccctgcagcgcgctccccaccagatttccaccctcgccgtgggtctttgcctctttgcggttaaagcagtaaggcagatcgcggtcatgatgttccgccagcgcgaccgccgtggtcgtggcgatagggatgcctttataggccgggccaaacagcaggtcaaaatcaatcccggaatccaccagcgcttcggcataaaaacggcctaacagtgccagatcgcgcccggtattaaacaggccggcgttgaagaaatagggactcttgcgcccggatttcagcgtaaactcgccaaacttaagtacctgcttgttaagcgcaaactcaataaactggcgctgatacggtttcatggattcgctcctcatcttacttttctacggacaaaaaaaaggcgacttctcagtcgccttaaaaactagttttgcaacgccgctttctgcgtcgtgacaatagattcgatacccccccgggccaatgccagcagggtgaggagttcttcatgggtgaacggctcgccttccgccgtaccctgcacctcaatgatgcggccatcttcggtcatcaccacgttcatatcggtttccgccgcggaatcttcaacgtattccagatcgcaaatcgcttcgccattcacgatgcccacggagaccgccgccaccattcctttcatcgggttggttttcagcttaccggccgcgaccagcttattcagcgcatcggccagcgccacgcaggctccggtgatagacgcggtacgggtgccgccgtctgcctgcagcacatcgcagtccagagtgatggtgaactcacccagcgctttcaggtcaaccgccgcgcgcagcgcacgcgcgatcaggcgctggatttccatggtgcgtccgccctgcttaccttttgcggcttcacgcgcgttacgcgtatgggtagaacgcggcagcatgccgtattcggcggtgatccacccctggccctggcctttcagaaagcgcggcacgccttcatcaatagaagcggtgcacaatactttcgtgtcaccaaattcgaccagcacggagccttctgcgtgttttgtgtagttacgggtcagggttactgggcgcacttgattagcgctacggcctgctggacgcatgatgttctccggcttgaaacgaatgtggctgcgcattatacggataatgcgcgcttattcctatcctgataaggcctcgaaagctataatccaccccactctcctttaaaaacaggaacgtctatgatccgcagtatgaccgcctacgcccggcgtgaaatcaagggtgaatggggtagcgccgcgtgggaactgcgctcggtaaaccaacgatatctggaaacctacttccgcctgccggagcagttccgtagcctggagcccgtggtgcgtgaacgtattcgctcccgtctgacccgcggtaaagtcgaatgtaccctgcgttttgagcaggacccgagcgcgcagggtgagctgatccttaacgaaaaactggcaaagcagctggttaacgccgccaactgggtcaaaatgcagagcgacgaaggcgaaatcaatccggtagatattctgcgctggcctggcgtgatgtcggcccatgaacaggatctggacgccattgccgccgaaattctgggcgcgttaaacggtgcgctggatgactttatcatcgcccgcgaaaccgaaggacaggcgctgaaagcgctgatcgaacagcgtctcgacggcgtgacggccgaggtggctaaagtacgtgcccatatgccggaaattttgcagtggcagcgcgaacgtctggttgccaagctggaagatgcggaagtgcagctggaaaacaaccgcctcgagcaggagctggtgctgatggcgcagcgtatagacgtcgccgaagagctggatcgtctggaagcgcacgtgaaagagacgtggaatatcctgaagaagaaagaagcggtcggtcgtcgcctcgactttatgatgcaggagttcaaccgcgagtcgaacaccctggcgtctaaatcaatcaatgccgaagtgacgaactccgccattgagctgaaagtgctgatcgaacaaatgcgcgagcagatccagaacatagagtaacggtttttcgctcgccaacccacgcacggacaaaaggccatggtaaatcatggccttttattttcgctgcgtttcagaaggcgtagttcttatccaatatccggcaggttaaaaatgcccctgcggcgcacagcagcgtgggggccagatagctgtgatccatgtgggtgaactccatcaccagcgcgaccgccgtgagcggcatctgcatggatgcagcgagaaacgccgccgcgccgacgagagcaaaactgccgtaatctccgccgggaagcagctgttgccagagcatacacagcagcaggctggtcaggccgccgaccgccagccccggcgtcagcaggccgccctccgcgccgccgcgcagcaccgccagaatcaccaccattttcagcgccagcagcatcgccgccccggggaaacccaggtcatcgctgagagccagctgcataggccctttaccgtttcccggaagctgggggaaatagaggctgaggacggcaagcagggaaaacgccagcagacagaaaaccggcatctgccagttgcttcgaacgcccgagcgggccgtgctggtcgctttgcgaaagagccaggccccggcgccaagaatggggccggcgatgatcgcccaccagagaaatgaatgcggcaggatgtcggaagtaaaatggtattgcgattcctcgcctaacccgagcgttgccgtccacgcggcaatcgccgaggtgataatcgccgccagcgttttttcccagctaaacgacagcagcattacctcaaggctgaataacgcaccggccagcggaacgttatacaccgccgccaggcccgcaccggcgccgcaggcaaccagcgttcgggtttcatccgccatcagtcccagcttacgcgccaccatccctgcccccagcgcgcccatttcccgcggagccacctcgcggccaagcggagagcccagcgccacggtgacgatctgcaacagggcatgaatcgttgtggtacccgcaggcattgccaccgaaggattcgccaccgctgacgctattgagactcgcttctgcccatagcgtccaaggagccaccagccgaatcctgcgatggctccccccgcgacgattgccgagaagcgacgaggccaggatgaatccgtgacgccctgtagaaatgactccgcgctcatgatctgcccggggctgtagccaaaggccaggtgctgaatcgcatgtaaaatcagcgccagaaccatgcctgagaggccggcaagcagccccgtcagcacaacggcaatcaggcgggtgagatagtttttattgccagctgctgcagtcattttctcaggccctgaaggaggaaaataaaaggataaaggtcgagagttaaacaacaggtattcatcgcgttttcaatatcgatacgcatcgacggctttcacattactttttataatcactaaaaatgaataaatgacaaatgaaccgttaaattcagccgatttaaaccgatcgtgcattagtttaatcaggttaaattcattcactttagaaaatctcaatcgtgatcttgcgcacaaatcgttaaccttccgccatcaccgtgggggatttatgctgcttcatattctttatctgattgggattacggcggaagccatgaccggcgcgctggctgccgggcgccgccgtatggatacgtttggcgtcattatcattgccaccgcgacggccctcggaggcggttcagtgcgcgatattctgctcggccactatcctctgggctgggtgcagcaccccgagtacgtcattattgtcgccattgctgcggtcctgaccacgattgccgcgccagtgatgccgcatctgcgccgtctgtttctggtgcttgatgcgctcggcctgatcgtgttctctatcattggcgcccagatcgcgctggatatgggccagggcccggtcatcgcctccattgccgccgtgatcaccggcgtctttggcggcgtgctgcgcgatatgttctgcaagcgtatcccgctggtgttccagaaagagctttacgccggggtgtcattcgccgccgcgattttatacatcgcgcttcagcattacgtcagcaaccacgatgtggtggtgatctccaccctgctgttcggctttaccgcccgcatgctggcgctgcgctggaagctgggcctgccggtatttaactacaaccatagcgcacattaatgctttcagaatcccggaacgcgttgcccgcttagccacttcgccagtgcggcaacatccgggtgatgtaagaacgtcaccagctgccgcgctctttccgccccgatccccggcaggcgccgccactgctcttcgtttcgctcctgcatccgttgccagtcatcctccttcagccgggcaaacgccgtcttcggtatagggactcccatcgcctggatccagcgcagaaaaggccgttcgcgcgcaagattgaactggtgccacagcctctgcccgcgctgcgttgagacccccggtatagcttgcagccgctccggcgtaaacgccaaccatgaaaagagatgctccatgctgcgcgcgtcatgcagggaccgccatagtgcttctcccacgccgtcaatatcaagaaccgatcgggatgagagccagaccagccgcgaaagaaactgttccgcacactcgggcgtggcaaaatagcaggttaaggcattgaaacgcgccgccggtggctggggtttattacgctgagccgtgcgccagacgaccgaatcgatgcgcggtatcccctgcccggcaaggctgatttgcagctggtcgccaataccgatatccagattgtaccagcgggataccgaaccgacgctcacccgctgcacgcgcttatcgtccagcatctgcggctccagatgcgccaccacggctattttaccgctgcgcccaatgctaaagctgatacggcgaacctccatgacgcgtgaggcgggcgggtatttccaggcgatgacccaatcgccctgacccggaacccagaagcgtccgggagatgctttttcccgccgcactacgacgccatcgctggcaaaaggcagcggtgaagtgaaccagcgctggcgccactgttgaacctgctgcgcatccgcgacagggtgcgaaaaaagcgcgctgtaaagaaagccgccctgccgcagcagcgccagccgctgtttcatatcctgcggcccatcgggccatgcccagataaagagacccagctgattaagatccgccgcagcctgctggcgcatcatcatgccggcaacttttgcccgcgcgttcatgccgcccatctgtttttgcacgtgcccctcgcggagcaggaacagctcaccctgtagaacgctattcgccagtacgccgtcagagactttaggcacggaggggatctgcaagaccctggccgtccagtcttccccggccaggccattaccccggcttatcgcctgggtcagacgcccctgccgatacacgagcgtgaccgcgacgccatcgactttaggctgtacccacaggccggattgaccgcgcatccagcgcgccacgtcggcttgatttgccagtttacgcacgccggtgtgcgccaccggatgtctggcctccccttttaggggaggagacgcatcgtgagcgggagcctcgccggtgaagcagcgccgccaataagccagccgctccgcaagctgatcatagacctcatcgcttaccgtactgctcccctgctgccagtaggcgtttttccattccgttatctgctggctgagacgttcaatctcccgatcggccctggcctgcggccacgcggggcaggctgcctgcccgtatcccaccagcatccacagcaccagcgcccagactcctttttgcatcgcgatgccctcctgttttctcgtcggcaattgtgccgcaggcttattttcatcggcgagaggggatttttaacgctgcgagcatgcttccggcttttctgcgttgtttctgcaacgcacggagaaatcaggaaaacagcaagcaaaatgaaagaaagaacgcaaaaagtgtgacagggactgcgtcacgctgcgccgccgtgtataataggctcgtatgtaagctctatttcgaccaccacatacaaaagacactcatggctcaaggcacgctttatattgtttccgcccctagcggcgcgggtaaatccagcctgattcaggctttattaaaaacccaaccgttatacgactctcaggtttctgtttcgcataccacgcgcgctccgcgcccgggtgaagtgcacggtgaacactatttctttgtgaatcacgacgaattcaggacgatgattggcgaagacgcttttcttgaacatgcagaagtctttggcaactattacggcacctcgcgcgaagctatcgagcaggtactggcgaccggcgtcgacgtcttccttgatatcgactggcagggcgcgcagcaaatccgcaacagaatgcccggcgcgcgcagcatttttatcctgccgccgtcaaaagatgagcttgatcgtcgcctgcgcggccgcggtcaggacagcgaagaggttatcgcaaaacgtatggcgcaggcagttgcagaaatgagccattacgcggagtatgattacctgattgtgaatgatgattttgataccgcgctgagcgatctgaaaattattattcgcgccgaacgtctgcgcatgagccgccaaaagcagcgacatggcgctttaatcaccaaactgttggcagactgaacccacattcagtatcatgcccagtcatttcttcacctgtggagcattttaagtatggcacgcgtaactgttcaggacgctgtagagaaaattggtaaccgttttgacctggtactggtcgccgcgcgtcgcgctcgtcagatgcaggtaggcggaaaggatccgctggtaccggaagaaaacgataaaactaccgttatcgcactgcgcgaaatcgaagaaggtctgatcaacaacaagatcctcgacgttcgtgagcgccaggaacagcaagagcaggaagccgctgaattacaagccgttaccgctattgctgaaggtcgtcgttaatcacactgcgggtcgcccttgtatctgtttgaaagcctgaatcagctgattcaaaactacctgcccgaagagcaaattaaacgtcttcggcaggcttatctcgttgcacgtgacgctcacgagggccagacacgttcaagcggtgaaccctatatcacgcacccggtagcggtagcctgtatcctggccgagatgaaactcgaccatgaaacgctgatggccgctctgctgcacgacgtgatagaagatacccccgccacctaccaggacatggagcagcttttcggtaaaagcgttgctgaactggtagagggggtgtcaaaacttgataagcttaagtttcgcgacaagaaagaggcccaggctgaaaactttcgcaaaatgattatggcgatggtgcaggatatccgcgtcatccttatcaagctcgctgaccgcacccataacatgcgcacgctgggctcattgcgcccggataagcgccgccgcatcgcccgcgaaacgctggaaatctacagccctctggcgcaccgtttaggtatccatcacatcaaaaccgagctcgaagagctgggctttgaggcgctgtatcctaaccgctaccgcgtcattaaagaggtggttaaagcggcgcgcggcaaccgtaaagagatgattcaaaagatcctctccgaaatcgaagggcgcctgcaggaagcgggaattccctgtcgcgttagcggtcgcgaaaagcatttgtactccatctactgcaagatggtgctcaaagagcagcgctttcactcgattatggatatctacgctttccgcgtgattgtccatgattccgacacctgctatcgcgtgcttggccagatgcacagcctttataagccgcgtccgggtcgcgtcaaagactatattgccattccaaaggcgaacggctatcaatctttgcacacctcgatgatcggcccgcacggcgtcccggttgaggtacaaattcgtaccgaagacatggaccagatggcggaaatgggggtggcggcgcactgggcttataaagagcacggcggcgagagcagcaccacggcgcaaatccgcgcccagcgctggatgcagagcctgctggagctccagcagagcgccggtagttcatttgaatttattgagagcgtgaaatccgatctgttcccggatgagatttacgttttcaccccggaagggcgcattgtcgaactgcccgccggcgcgacgccggtggatttcgcctacgcggtgcataccgacatcggccatgcctgcgtcggcgcccgcgtcgaccgccagccgtatccgctgtcgcagtcgctctccagcggccagacggtggaaatcatcaccgcgccgggcgcacgtccgaacgccgcatggctgaactttgtcgtcagctcgaaagcgcgcgccaaaattcgccagctgctgaaaaatcttaagcgcgacgactccgtaagcctcgggcgccgcctgctcaatcacgccctcggcggtagccgcaagctggccgagatcccgcgagagaacattcagcgtgaacttgagcgcatgaagctgaccacgcttgacgatctgctggccgaaatcggcctcggcaacgccatgagcgtcgtggtagcaaaaaacctgcagcagggtgaaaccaccgccgtgcctgtacagccagcgcctgtcggccataatcatctgccgattaaaggcgcggatggcgtgctgatcaccttcgccaaatgctgccgcccgatccccggcgacccgattatcgcgcacgtcagcccgggcaaaggcctggttattcaccatgagtcctgtcgtaacattcgcggctatcagaaagagccggagaaatttatggcggtcgagtgggacaaagagacagcgcaggaatttatcaccgaaatcaaggtggatatgttcaaccatcagggtgccctggcaaatcttaccgcggcgatcaacaccgcttcttccaatattcaaagcctgaatacggaagagaaagatggccgcgtttacagcgcctttattcgccttaccgcgcgcgaccgcgtgcatctggcgaatatcatgcgcaaaattcgcgtcatgccggatgtaataaaagtcacccgtaaccgaaactagctcttccacaaaatcattcgaattgcgtcaaggcggcaagcgaatgacaaatctgccgggagcagatttgaacgctgcttacagcggccccgtaaagggcaaggcccaggaatgggccgcgtaatccgcagcgattaaagagtcattcgaaggatggaagtatcatgaatttacagcgttatgcgcgtatctgcgagatgctcgccaggcgccagcctgacctgacagtctgcatggagcaggtccataagcctcataacgtctctgcggtcattcgtaccgcagacgccgttggcgtgcatgaagtgcacgccatctggccaggtagccgtatgcgtaccatggcctccgcggccgccggcagcaatagctgggtgcaggtcaaaacccaccgtactattggcgaggctgtcacgcatttaaaaggccagggcatgcagatcctggcgacccatctctctgataacgccgtcgatttccgtgaaatcgactatacccgtcccacctgtatcctgatggggcaggagaaaaccggcattacgcaggaagcgttagacctggcggaccaggacatcatcattccgatgattggcatggtgcagtcgctgaacgtttccgtcgcctcagcgcttatcctctacgaagcccagcgccagcggcagaatgccggcatgtaccggcgcgagaacagtatgctgccggaagaagaccagcagcgcctgctgtttgaaggcggctatccggtgctggcgaaggtcgctaaacgcaagggactcccctacccccacgtcaacgagcagggcgaagtcgaagccgatgccgcgtggtgggccaccatgcaggcggcgaagtaatcatgcagggccgtctgctggatgcggtgccgctcaattccctgacgggcgttggcgcggcccagagcagtaagctggcaaaaatcggcctgcatacggtacaggatctgcttctgcacctgccgctacgctacgaagaccgcacccatctgtatcatatcggcgaactgctgcccggcgtttacgccaccgttgaaggcgaagtcctcaactgcaacatcactttcggcggccgccggatgatgacctgccagataagcgacggctccggcatcctcaccatgcgcttttttaacttcagcgcggcgatgaaaaatagcctggcaatcgggcgccgcgtgctggcctacggtgaggcgaagcgcggtaagcacggggcggagatgatccatccggaatatcgggttcagggcgacatgagtacccctgatttacaggaaacgctgaccccggtatatcccaccaccgaaggcatcaagcaggctacgctgcgtaagctcaccgaccaggcgctggagctgcttgaaacctgcgcgatcgccgaactgctgccgcctgagctggcgcaagggatgatgagcctgccggacgccttgcgcacgctgcatcgcccgccgccctctttacagcttagcgagctggaaagcggcaaacatccggctcagcggcgcttaatcctggaagagctgctggcgcataacctcagcatgctggcgctgcgggcaggcgcccagcgctaccacgccctcgcgctcagcgctaacgacacgctaaaagataagctgctggcctccctcccctttacgccgaccggcgcgcaggcgcgcgtcacggctgaaatcgagcgcgatatggcgctggacgtgccgatgatgcgtctggtgcagggggacgtgggctccggtaaaaccctggtcgccgcgcttgccgccctgcgcgccatcgcccacggcaaacaggtggcgctgatggcgccgaccgagctgctggctgaacagcacgccaataacttccgcagctggttcgaaccgctgggcgttgaggtgggctggctggctggcaaacaaaaaggcaaagcgcgcctggcgcagcaggaggctatcgccagcggacaggtacagatgattgtcggcacccacgccatctttcaggagcaggtccagtttaacggcctcgcgttggtgattatcgacgagcagcaccgttttggcgtccatcagcggctggcgctgtgggagaaagggcaacagcagggatttcacccgcaccagctgattatgaccgccacgccgattccgcgtaccctggcgatgaccgcatatgccgacctcgacacctcggtcatcgatgaactgccgccgggccgaacgccggttacgacggtggccattccggatacgcgacgcagcgatattattgaccgcgtacgtcacgcctgcactcacgaaggtcgccaggcctactgggtttgtacgctgattgaagagtcggatctgctggaagctcaggcggcggaagccacctgggaagagctgaagctcgccctgccggagctgaatatcggcctggtgcacgggcgtatgaaatccgccgagaagcaggcggtaatgagcgcgttcaagcagggcgagctgcatctgctggtcgccaccacggtgattgaagtcggcgtggacgtgcccaactccagcctgatgatcatcgaaaacccggagcgtctggggctggcgcagctgcaccagctccgagggcgcgtcgggcgcggtgcggtagcctcccactgcgtgctgctctataaatcgccgctgtcaaaaaccgcccagaagcgcctgcaggttctgcgcgatagcaatgacggtttcgtcatcgcccaaaaagacctggaaattcgcggtcccggcgagctgctcggcacccgtcagaccggcaacgctgaatttaaagtcgcggacttattgcgcgatcaggccatgatcccggaagttcagcgcatcgcccgccatattcacgaacgctatccccagcaggcacaggcgctgatagagcgctggatgccggaaaccgaacgctattccaacgcgtagcgcgaacatcatctcgccacgctgcgcataatttttattcagatgagtggattatgaaacgagaactggccatcgaattttcgcgcgtcaccgaagccgccgcgctggcaggctacaaatggttaggccgcggtgataaaaataccgccgacggcgccgccgtcaacgccatgcgcattatgctcaacctgatcaacatcgacggcactatcgtgattggcgaaggcgaaatcgacgaagcgccgatgctgtacattggcgagcgcgtcggtaccggccacggcgatgcggtagatatcgccgtcgatcccatcgaaggcacccgcatgacggcgatgggccaggcgaacgcgctggcggtcatggcggtaggcgataagggctgtttcctgaatgcgccggatatgtacatggaaaagctgattgtcggcccgggagcgaagggcaccatcgatctgaacctgccgctggcggagaacctgcataatatcgcccgcgcgctgaataagccgctgagtgaattaacggtcaccatcttagccaagccacgccatgacgacgtcattgttgagctgcaaaagctgggcgtgcgcgtgttcgccatccccgacggcgacgttgccgcctctattctgacctgtatgccggacagcgaagttgacgtcatgtacggtatcggcggcgcgccggaaggcgtcgtttccgctgcggtgatccgcgcgctggacggcgatatgaacggccgtctgctggcgcgtcaccacgtgaagggcgacagcgaagagaaccgccgcatcggcgaaaacgagctggcacgctgtcaggcgatgggcattgaagcaggcaaagtgctgcgcctggacgatatggcgcgcagcgacaacgtggttttctcggcaaccggcatcaccaagggcgatctgctggacggtatcacccgtaaaggcaatatggccaccaccgaaaccctgctgatccgcggtaaatcccgcactatccgccgtattcaatcgattcattatctcgatcgcaaagacccggatattcagctgcacatcctgtaaaaacatttgatcaatagagctttccagccttttcgggctggaaatctgctctcgtcgcggtgaagatacgttaacaggattgagaggagagtcgctatggcaaactgggttacgggcaaagtggtaaaagtacagaactggactgatgcactgtttagcctcaccgttcacgcgccggttgcgcccttcaccgctgggcagtttgccaaactggggctggacgtagacggagaacgcgtgcagcgcgcctattcctacgtcaacgcccccagcaaccccgatcttgagttctatctggtgacggttccggagggcaagctcagcccgcggctggcggctctgaagccgggcgatgaagtccaggtagtcagcgaagccgccggtttcttcgtgctggaagaggtgccggattgcgacacgctatggatgctcgccaccggcacagcgattggcccgtacctgtcaattctggaagaagggaaggacctggatcgctttaaaaacctggtactggtgcacgccgcgcgctatgccgccgacctcagctatctgccgcagatgcaggcgctggaagcgcgctatgcgggcaaactgcgcatccagtcggtcgtgagccgggaaaccgcgccgggcatgctcacgggacgtatcccgttcctgattgaaaccggcgcgctggaagaggccgtcggcctgccgatgaacgccgagagcagccacgtcatgctgtgcggtaacccgcagatggtgcgcgacacccagcagctgctgaaagagacccggcagatgagcaagcacctgcgtcgccggccgggtcatatgaccgccgaacactactggtaatcaggattccgctttccagcgcacgtccagcgtctctttaccaaacttattcgcgccctgggtaccgacaaacgcgcccaggtcgatcagcatcatgacgataatcagcgtcggtataaaccgcccgacgccccactgccagaccccaggcagcatcgaccagttgcccgccagcagcatccacgccagaatcatcagcagcgcccagagcccggatttaccccgatcgtgcaggcgtttaatggtcaccgccgccgtcggccacagcaggcacaccagaataaaagccgccgtctgtaaattgagaaggttactaccggccagcgtgaacagcgcgctcatggtcattatccagatagcgatccagatccagaagtcgcgacgtccaatccgccctttaattgagaatagccactgctgtagggtcatgttttattccttatcatcatcaccgacgtagtttaccctgaaggcgtgactttttgacaagcgtgacggttctcgttttaatcgtcagcagataaaaaaagggaagatgggcatgaagaagtgggcaaccttatgtttaattgggctggcggcattatccgtcggccaaaaagcgttgtccgccgagtcagacgccagcgctacggcgccctatcttctctccggcgcgccggcctttgatatttccatcagcgagtttcgggaaaaattcaacaacgataacccgaagctatcgctcaatgaatttcgcgccgtcgccgccagcaaagaccaggcaaacctgacccgcgccgccacgaagatcaatgagaacctttacgcgtcgaccgcgcttgaacgcggcacgctcaaaattaaatcgatgcagatcacctggctaccgattcaggggccgcagcagaaagcggcgaaagcgagagcccaggagtatatgagcgccgtgatgcgcgcgttcgtacccacgctcagcctgacgcaaagccagcagaagctgcagaaactgctgaccgccggaaaaggcaaacgttacttctccgaaacggaaggtgctgtgcgctatgtggtggcggacaacggcgaaaaggggctgaccttcgctgttgaaccgattaagctggcgctatctgaaacgctggaaaacaacaataaatgacaaaaagcaaagcctttccagtgatgaatctctatactgtttcacagaccatgctgcccgcgggggcggctatattccttaattcgctttaaagcgtggagaataaaaatgcgacatcctttagtgatgggtaactggaaactgaacggcagccgccacatggtaaacgaactggtcgcgaacctgcgtaccgaactggctggcgtaaccggctgtgcagttgccattgctccgcctgagatgtacatcgacctggctaaacaagccgctgcgggcagccacattcacctgggcgcgcagaacgttgacctgaacctgtccggcgcgttcactggcgaaacctctgccgaaatgctgaaagacatcggcgctgaatacatcatcatcggccactccgagcgccgtacctaccacaaagagtccgacgagtttatcgccaggaaattcgcggtactgaaagagcagggtctgatcccggttctgtgcatcggtgaaaccgaagcggaaaacgaagcgggcaaaacggaagaagtgtgcgcgcgtcagatcgacgccgttctgaaaacccagggcgcggcggcgttcgaaggcgcagttatcgcttatgagcccgtatgggcgatcggtaccggcaaatccgctaccccggctcaggctcaggctgtacacaaattcattcgcgaccacatcgctaaagctgatgcgaaagtggctgaacaagtgatcatccagtacggcggttccgttaacgcgggcaacgcagcagagctgttcacccagccggacatcgacggcgcgctggttggcggcgcatccctgaaagctgacgctttcgcggtgatcgttaaagcagcagaagccgcgaaaaaagcgtaattcgctttaaggcctttccccggtcgcgctttgcaaccggggttatcgcccggttgcccggccaggtcccggggaaatccccgagcggtgcagcctacagtttccccaacgcctgataccacaggtagtccagcggcagcaggatcaaatagcttaccgccgccagcgcaatacacagcagcattcccgcccttgcaggcactttccccagccccattgccaccacaatcggtgatgcctgatacggcagcagcggcgtggagtatcccagcacctgaatcataatcacgctcagcagcgggaagccggtcgcatcggagaagctctgcgcgaaggtggtatacagcgccggtacgccgttagcggtcatgataaagttcagcgcgctggtaatgccggtcaatgcgagaaagctggtgaacggactctctttatccagcggcataatctgcagcagggcattccccaccacgccgccgataccggtttgcgtcacggtgatagccagccccaaaatcccggcgacgtaaatacaggtgcggatattcacgccgctggaaaactcctcgccgctgataaaaccgacccgcggcagcagcgttatcaccgccgccgccagccccgtccaggccggccccactccgtgccagctctccgtcacccagagcgtcagcactaccaccagcagccacgccaggcgcttctcatcgcggctcatcggcggcagcggcgtcatgtcgcgcggcgggtgcggttttccgggaaacagccagcatatcagggcgatcagcacagcccctttgagccagccgagcaccggcgtatgcagcagtaaatagggaagataattcaaatggataccatacgatccctccgccgcgccgctcatcaccagattcgggacgttggcgggcaggatggtggcagacagctggaaggtcccgaaccccaccgccagcgccaggccaaaccacgggcgcgtcccctcttcaatgccggcacgcctggccattgccgccacaatcggcatcagcagcgcgatacgccccatattggacggcatcacaaacgccagcgcatagctgagcagcaccacgctgccgaccatcagcggccaggagtcggtcagccgcgacgagagcgaccgggccgctctgtccgccagcccggttttgcgtatggcgatccccagcacaaatccgctgaacaccagccagaacgccgatgaggcaaagccgccgaaaatcacctccggcggcgcgattttggcgatcatcgctgcggcaaaaaacagcagcgcggtcataaactccggcagtagcgaagtcgcccagaggagaatagtgatgccgacgatgatagaaggaaggaacagagggtgggacaaccagagcgacatacctgtctcctgtcgattttttcagcaagaatacgacggacgataagacaggtaaacgccagatatggtggggttattgcaggattgcgcagctgtgatcctgaatctcttccgccgatgcgcgattaagcgttagcaggttacgctcggtcgccagcagcaccagcgagccatcgctctgctttgccatcgccagcgcaaaacggcccatatgttcacgcgcttccggcacctcttcggccagcatcaggaacgggctgcgctgcgccagctccgtttcggtgacccgacgcgccagatattcgtggcccagtagtccaccgggcagcggcaaccagcggctgctgatagcgggcgcgtccttgtccaactgggtacggacatcgggacgcaggcaggagatatggatatggaaatgattttgcgtgcgtccgctgcgcgagttgatggtcaaggagaccgcgtcatccgatacggcggaaccacgatgctggctcatgatttcgcgcccctgccaggcctgccagaagaagttcggcgtcaggggattaagcagcagcggactttcggtgccgttaatacggtaagtcggcatcagcagatactgcagcgggccattgcggtctttaaacagcacatagccgcccttgaggttcacttccgcacagggcgcgggattctggtgctgctgttgattggggacgcactgttgcagaacaattttgcgcaacgcatcagggttgccggaatgaagccagtagtagccgccggccatcgccgccacaacgaccaccagcagcgctaataaaaggtatcgtactcttcgcattattttttcctgtctcagccagaaacggaagagtaacgcagtttgatgaccaaatgaaaacaggaagaggttcggtgtgttttcccggaggcggcgctaccagacttctcagccccgggtcgcggcttacgcctgtccgggcgacaagagttgtatccccgctaagcgcagcgcaagcggggataaggaaaggctatttaacgctggtttatctggtcgaaggtgccgccgttggaaaagtgctctttctgcgctttcgtccagccgccaaacacatcatcgatggtgaacagcttcagtttcgggaactcattcgcgtattttttcgctatctcaggatcgcgcgggcgatagaagttcttcgccgcaatctcctggccttccggcgagtagaggtacttcagatacgcttccgccacctggcgagtgcccttcttgtcgaccactttatccaccacggaaaccgtcggctcggcgagaatcgattcgctcggggtcacgatctcaaatttgtctttacccagttcgttggtcgccagcagggcttcgttttcccaggcaatcagcacatcgccgatcccacgttccacgaaggtgttggtcgcaccacgggcgccggaatccagcacctcgacgttcttaaacagcgcttttacgaactcttgcgccttcgcctggtcgccattgttctggtgcagggcatagccccatgccgccagatagttccagcgcgcgccgccggagcttttcgggttcggggtaatcaccgacacgcccggtttaatcaggtcgttccagtcgtgaatctgcttcgggttgcctttgcgtacgaggaacacgatggtggaggtgtacggcgcggagttatccggcagacgcttcagccagtttttgtcgattcggccacgttcggcaatcgcatcgacgtcataggccagcgcaagggtcaccacgtcggcttcaatgccgttgatcaccgaggtcgcctgtttgccggagccgccgtgggactgacgaatcaccacgttgtcgccggtttcttgtttccagtgcgcgctaaaggctttgttgtactgttcgtacagctcgcgcgttggatcgtaagaaacgtttaatagttgaatgtcttttgccagaacgctggcggatgccagcaacagagttaaccccacgccccacttattcatcgcaccgctctctttatgtagtgttgtgatggattaagcgtgccagaaagcggactgatgattaaagaataaaaaaagattggctataacttgtgagtatatagagcgggggagagtttaccccctcccgagcgggagggggcgggaagcatcagacttcttccatgcggcccagcagcgcctgcagacgatcctgccagccctgctgctgttctttcagctgaccgttttcacgctcaagctcttcacggctgtgctgcgcgctctgtacttcctgcgccagcgtgttgttcttctctttcagctcttcgatttccatctgtaacagagtgatggtatcaatcgcctgctgaactttagattctaatttctcaaacacttctaatgacatcgtcatacctctcctgaacttgcaaggcgttgatagaaaccgtccgtttcgtatacgcgttgacgccttaacgaaaattagcgcactacagtggtgatgtagtcgattgtatgaagccccgcctcccctgtccagcgacaacccgcgtagattgcggtttgcaacacttttcagcctttacctggtccgttcgccgcttttacccggtactttttcgtaattgttaatcaacacgtaaaaaaatgtgcggtgaaacgctcccgcaaacggccgaaaacgcgtttatggcgcgaaaacgctcattttcttgacgtggtacacacatttgaatttcgatatttctcgtttttgttcgttaacgataaattaacactatgcctacatggcagcgtggtcgcctgcgaccttcacacatacaataatcatcactacgcttcaggattcgattatgagccaaacatcaacactaaaaggccagtgcatcgcagagttcctcggtaccgggttgttgatctttttcggcgttgggtgcgtcgctgcgcttaaggtcgcgggagccagcttcggtcagtgggaaatcagcatcatctggggtctgggcgtcgccatggcgatttacctgaccgcaggggtttccggtgcgcaccttaacccggcggtcaccatcgcgctgtggctgttcgcctgctttgacggtcgtaaagttgttccatttatcgttgcgcaattcgctggcgccttttgcgctgcggctttagtttacgggctttattacaatcttttcttcgatttcgaacatacccacaatatggtgcgcggtagcgtcgaaagcctcgagctggcaggcattttctccacttatccgaatccgcatatcaattttgtgcaggccttcgcggtagaaatggtgattaccgctatcctgatgggcgtcattctggcgctgaccgacgatggtaacggcgtgccgcgtggcccgctggcgccgctgctgattggtctgctgatcgccgtcatcggcgcatccatgggcccgctgaccggcttcgccatgaacccggcgcgtgatatcggaccgaaagccttcgcctggctggcaggctggggcaacgtcgccttcaccggcggcaaagatattccttatttcctggtgccgctgtgtgcgccaatcgtcggtgctgcgctgggcgcattctgctaccgcaagctgattggccgccacctgccttgcgacacctgcgtcgtcgaagagaaagaagccgcatccccctctacgacgcaacacaaagcttcgctgtaatctgactacgggactcatactatgaccgacaaaaaatatatcgtagcgctcgaccagggcaccaccagctcccgcgccgtggtaatggatcacgatgccaatatcgtcagcgtttctcagcgagaattcgaacaaatttatccgcgtccaggctgggttgaacacgacccgatggagatctgggcatcgcaaagctctacgctggtcgaagtgctggcaaaagccgatatcagctccgatgaaatcgcggcgatcggcatcaccaaccagcgtgaaaccgccatcgtgtgggagcgcgaaaccgggaagccgatttataacgccatcgtctggcagtgccgccgtaccgccgagatctgcgaacagctcaagcgcgacggcatggaagagtacatccgcaaggccaccggcctggtggttgacccgtacttctccggcaccaaagtgaagtggatccttgaccacgtcgaaggcgcgcgcgaacgcgctaaacgcggcgaactgctgttcggcaccgtagacacctggcttatctggaaaatgacccagggacgcgttcacgtgaccgactacaccaacgcctcgcgtaccatgctgtttaatatccacgagctggactgggacgacaaaatgctcgatgcgctggatatcccgcgcgccatgctgccggaagtgcgcaaatcttccgaagtgtacggccagaccaacatcggcggtaagggtgggacgcgtattccgatcgccggcatcgcgggcgaccagcaggcggcgctgttcggccagctgtgcgtgaaagaggggatggcgaaaaacacctacggtaccggctgctttatgctgatgaataccggcgagaaagcggtgacgtcaacgcacggcctgctgacgactatcgcctgcggcccgcgcggtgaggtgaactatgcgctggaaggcgcggtgtttatggcgggcgcctctattcagtggctgcgcgatgagatgaagctgattagcgacgcgttcgattccgaatatttcgccaccaaagtgaaggataccaacggcgtgtacgtggttccggcttttaccggactcggcgccccgtactgggacccgtatgcccgcggcgcgatcttcggcctgacccgcggcgtgaactccaaccatattattcgcgccaccctggagtcgattgcctatcagacccgcgacgtgctggaagcgatgcaggctgactccgggatccgtctccacgccctgcgcgttgacggcggcgcggtcgccaacaacttcctgatgcagttccagtccgatattctcggcacccgcgtggaacgcccggaagtccgcgaagtcaccgcgctgggcgcagcctatctggccggtctggcggtcggtttctggcaaaacctggatgaactgcaagagaaagcggtcatcgaacgcgagttccgtccggggattgaaaccaccgagcgtaactatcgctacagcggctggaagaaagcggtaaaacgcgcgctggcgtgggaagagcacgacgaagcgtaagatgggagtattcccggctggcggcgtaaacgccttagccgggctaccgcccacagaccgcacaaccccgtagcccggctaagcgcagcgcgagccggggagaagccgcgccgatgtatgaatcccggagtatccccgggttgcggcgtaaacgccttacccgggctacagcccgcagaccgcacacacccgtagcccggctaagcgcagcgcgagccggggggaaaccgcgtcgatgtataaatcccggggtatccccgggttgcggcgtaaacgccttacccgggctacagcccgcagaccgcacaccccgtagcccggctaagcgcggcgcgagccggggagaagccgcgccgatgtatgaatcccggagtatccccgggttgcggcgtaaacgccttacccgggctaccgcccgcagactgcacaaccccgtagcccggctaagcgcagcgcgagccggggagaagccgcgtcgagtcatgaatccctgagtatccccgggttgcggcgtaaacgccttacccgggctacagcccgcagactgcacaaccccgtagcccggctaagcgcagcgcgagccggggggaaaccgcgtcgatgtataaatcccggagtatccccgggttgcggcgtaaacgccttacccgggctacagcccgcagaccgcacaaccccgtagcgcaccgcctccgggtttttatcagccaaataccggcagcagcagatagagcttaatcaccagcgcgttaacgatatcgataaagaacgcgcccaccatcggcaccaccagaaacgccatgtgcgacggaccgaaacggtcggtaatcgcctgcatgttggcaatcgccgtcggcgtcgcgccgaggccgaaaccgcagtggccggctgccagcaccgcggcatcgtagttttttcccatcatccggtaggtcacaaacaccgcatacagcgccatagccactgcctgaaccgccagaataataatcatcggcagcgccagcgacgccagctcccacagcttcaggctcatcagggccatcgccaggaatagcgacaggctgacgttacccagcaccgacaccgcgcggtcgaacacgcggtacaggcccagcgccgacaggctattgctcaggatcacgccgataaacagcacgcaaacgaaggtgggcagttcaaatacggttcccgccagcagttgcgcaacgatcttccctaccgttaaacagatggcgatcagcgcgatgctctcaatcagcaccagcgacgtgatcatgcgccccatatccggcttttcaaacgcggtcggcgcgagctgatcgtccggcgtaccgtccggggaggaagagtgcttaaccagatagcgcgccaccggtccgccgatcaggccgcccaggacgaggccgaaggttgcgcaagccatggccacttcggtagcgttggcaaagccatagcgttcaacaaacaatttactccacgccgcgccggtaccgtggccgccggaaagggtaatcgaaccggccagcagccccatcagcgggtcgaggccaagcagcttcgccatgccgattccgagcgcgttttgcagcagcagcagccccaccaccacaatcaggaacgtccccagcactttgccgccggagcgcaggctggcgaggttggcgttcaggccgatagtggcaaagaaagccagcatcagcggatctttgaggctcatatcgaaatcgatttcgatatccatgcttttctttaataccagcagcgccagcgcgaccagcaggccgcccgcaacgggttcaggaatggtgtatttcttcaggaaagggacggtttgaacgagttttctacccagtagcaacacgagtgttgcggcaacgagcgtcgataaggtatcgagatgaaacataaaaaagagctccttataggcgcatgatccattcacacgcgacggtattcccggtgtcgattgcttctcatcatgagtaatcgggaagggattttaagcagaagtacggaaaaaaggacaggaaaagatattttgtagggataatgatgcgatcaagcatacaaaatgttaataaatttttgacacttattccctgcttaaatatttgccgctaaagagtggcaaacgtttgcttttggtctacagtccgataaaatccccgctttgccacctttgggattgttgtgatgtccgttaacaccgcagaatcagaaaatgcgcaaccggttgcgcataagcaaaccagcgaattaatctaccgccttgaagaccgcccgccgctaccgcaaaccctgttcgccgccttccagcacctgctggcgatgtttgtcgcggtcatcactccggcgctgttaatttgccaggctctgggccttccggctcaggatacgcaacacatcatcagcatgtccctgttcgcctccggcgtggcctccatcattcaaattaaagcctggggcccggtggggtctggtctgctctcgattcagggcaccagttttaacttcgtcgcgccgctgattatgggcgggaccgccttgaaaaccggcggcgccgatgttccgaccatgatggccgcgctgttcggcaccctgatgctggccagctgcacagagatggttctctcccgcgttctgcatctcgcccgccgcattattaccccgctggtctccggcgtggtggtgatgattatcggcctgtcgctgattcaggttggcctgacctccatcggcggcggctatgccgccatggccgaccacaccttcggcgcgccaaaaaacctgctgctggcagggatcgtgctggcgctgattattatccttaaccgccagcgcaacccgtacctgcgcatcgcttcgctggttatcgcgatggcggccggctacctggcggcatggctactcgatatgctgccggccaataccgcgccgacggaaagcagcctgattatggtacccacgccgctgtactacgggttaggcatcgactggaatctgctgctgccgctgatgctggtgtttatgattacctcgctggaaaccatcggcgatattaccgccacctctgacgtctccgagcagccggtttccggcccgctatatatgaagcgtctgaagggcggcgtgctggccaacggtctgaactcgtttgtttcggcggtattcaacacctttccgaactcctgctttggccagaacaacggcgtgatacagctgaccggcgtcgccagccgctatgtcggtttcgtggtcgcgctgatgctgatcgtgctcggcctgttcccggcggtaagcggcttcgtgcagcatattcctgagccggtgctcggcggcgcgacgctggtgatgttcggcaccattgccgcctccggcgtgcgtatcgtctcccgagagccgctgaaccgccgagcgatcctgattatcgccctgtcgctggccgtcggcctcggcgtttcccagcagccgctgatcctgcagttcgcccctgactggctgaagaatctgctctcctccggtatcgctgctggcggcatcacggcgattattctgaatctgattttcccgccagagaaaaactgatcctctctgacgctccggccacgcgatgctggccggagcgtcagcatcatcaacctcacatcatctcattacacaattcctgtcttgaggattgcgcataattcgggcataacagccttatgtgcctcgctcaggatcgaagaccatgaaatttctcagaaagctgattctctggctgctgattgccctgctggtggtgattattgccgcttacttcctgctgcaaacccagtggggcggacgccaggccagcgcctggctaagcgacggtaccggctggaaggtctctttcaacaagatggaccataatttctcctcgccactgcacctgcagctgcaaaacgtcaccctcggacgcgacggcaaacccgccacgctggtggcgcaaacggtggatatcgggtttagcagccgccagtttagcgacccgctgcatgctgacgaaatcgtcctcagcgacggcacgctgaacttctccccttcttccgcggcgctgccattcgccgccgaccgtctccagttgcgcaatatggcgttcaacagcccggagagcgactgggatctgagcgcgcagcgcgtcaccggcggcgtcagcccgtgggcgccggaagcgggcaacgtgctcggcaagaaaacgcagattcagatgagcgccgggtcgatgacgctcaacggtattgaagccagcaacgtgctgattcaggggaatattgataacggcgaagtgtccctctcgaccattggcgcggacgtcgcccgcggtacgctcaccggcacggcgaaacgcagcgccgacggcggctggcaggtcgataatttgcggctcaacgagattcgcctgcaaagcgataaatcactcgccgactttttcgcgccgctgaccaccctgccgtcactacagattggccgccttgatgtgaccgacgccagcctgcaggggcctgactgggcgatcgccggcctcgatcttaacctgcgcaacctcaccctgagccgcggcgactggcaaagccaggagggtacgctgtcgatgaacgccaacgagtttatttacggctcgctgcacttcctcgacccgatccttaacgccggattctcgccgcagggcatcgcgctgcgccagttcacctcacgctgggagggcggcatggtgcgcacgtccggcaactggctgcgcgccggccatgcgctggtgctggatgacgcggcgttcgccgggctggaatatacgctgccaaccaactggaagcagctgtggatggcgccgctgcccgactggctgcaaagcctgacgctgagaaagttcagcgccagccgcaacctgattatcgatattgaaccggcgttcccgtggcaaatcaccgcgctcgacggctacggcggcgagctgcagctggtgaaaaaccgcagctggggcgtgtggagcggtagcgcgacgctgaacgccgccgccgcgacctttaatcgtattgatgtccgccgcccgtcgctgaagctgagcgccaatgcctccacggtgaacgttaacgagctcagcgcctttaccgagcgagggatcctgcaagccaccgcggcggtgtcgcagctcccgcagcgcctggtcaacctgagcctgaacggtcgcggcgtgccgctgaatattttgcaggcctggggatggcccgcgctgccggtttccggggacggtaaccttcagctgacggcgaccggcagcgtgctggcggatgcgccgctgaagccgaccgtcaacggccagctgagcgcgataaatatggagaaacagcaggtggcgcaggtgatgcgcaacggggaggtcaccagcacccagcccccttcagcgccggcgacaacgacgccctgactttccccctccctctcccccacgggagaggggcctgttccattcgcgaaacctgttgccattaagcggctgtttgtacctatttcccgcaacctgttcctttcaaatagcggacttgctataacaaaaatactggaagttaaaaaaataattaaagtccctgaacctatacccaaaataattcgagttgcttaaaggcggcaagggagtgagtccccaggagcatagataactatgtgactggggtgagcgacaaatctgccgggagcagatttgaacgtcgcttgcgacggcccgtgagggcgaggcccttggatgggccgagtaatccgtagctaacacataagcaacttgaagtatgacgggtatacaaaaataaaggaacgaccatgtctgtaatacgtcaacgtattctggagaatatgcaaaaattctccagagcaatgatcggtgcagtattgttcttgccggtcatcggcttaattttggcactcagttcagtcttaaccaacccaacattaatttcggagaccagctttttacaccagctcggccagctgctcggcgatactttctggcctttattcggcaatctgggattacttttttgcgtcggcatcagctatggcctggcaaaagataaaaaaaccgaagtggcgctggtgtcggtgatgtgttttatcatgtttcttggcgccaaccactcgtggctggagcatacccacggactcgcggaaaaaattaacggcgaatattacggtaccgggcagactcagctgctggggtttgtggtagtcgatatgggggtcttcctcgggattattctcggctgcaccatcgcctgggtgcataacaaagtgtcgacgattgaactacccggcgcgctctccatgtacggcggagccaagctgacgctggtggcgatgaccccggtcgtcattttctacgccatcgcctttacctggatctggccgtttatgacccacggcatcgcggcgctgaccggctttatgaaaaacgccggcgtggcgggagtcttcgcctacggcttctttgaaaaattcctcatccccaccggcctgcaccacttcgtctggtcgccgttccagctcacgcaaatcggcggtacgctgaacgtcgacggccaggtcgtctccggcacccaggcgattttcctcgcctatatgcgccacccagatttaaccccggtgatgaacgaggcgctgcgtttctcgcagcaggggatgaccaccatctttggcctggctggcgcctcgctggcgttctaccacacggcgaaaccggagaaaaaaatgatggccaaagcgattctgctaccggccattatcacctctatgctcaccggcatcaccgagccgattgagtttaccttcctgttcgtttcgccgctgctgtgggtgatccacgccacgttaaccgcggcctcgcaggcgatttgcgacatctttaccgtgcgtccctggggcgcttccgggctgattgagttcctgatttacaacctgccgctgccggtctccctgacccgctggcccggctacgtgcttatcgggattggtcagttcgccgtttactacgttatcttccgcacgctggtcgttaagttgaatcttaaaacgccgggtcgtgaagacgatgaaaacgtgaagttatatagcaaagctgattaccgaaaaaaaatgggcgaaccgcagtcggtcaccaacgaaattattaatggtctgggtggtaaagagaacattatttccgtcgacaactgttttacccgcctgcgcgtcgttattcataatatggatctggttgacgatgcgatattaaaaagcaccggcgcaaacggcgtagtacgaaatcgaaatgaagttcaggttatttacggcgtcaaagtgggacaggttcgttcccgggttgatagctggctagcagaaaattaattgggagtgatttatgaaattaaccgtattaggcgggggcggcgttcgctctgcgtttctggcgaaatctctggcatataacgcgcaccgcattggtttaacggaagtggtctttctcgacagctccgcggagaatctgacaatattcggcgagatcgcccgttatgtgtttaatgccattcgcccggatattcatttcagcgtaaccagcgacccggtgccggcgctaaaaaatagccactatgtgataaccaccctgcgggtgggcggcgatgagagccggatccgcgacgagcgtatcgccctggcgcacaacacgctgggccaggagaccaccggcgcgggcggtttcgccatggcgatgcgttccattccggcgattcttcactactgccgcctgattgaagagcacgccgccgaagatgccattctgtttaacttcaccaacccgtcagggctggtcaccgaggcgattatcaaatccggctttaagcgtcgggtgtacggcatctgcgatgccccgtcggagctgattcgcgagctgcccgagatcctcggctgcgacgagcgcgatctcggcgtcgagtgctacgggctgaaccacttctcctggtttacccatttcaccgtgcgcggcgaggatgtcaccgagcgcctgatcgccagcccggacctgtatcgcaagacggcgatgcagtacttttcgccggagctggttcagctatgcgataagcagctgcttaatgaatatctttactactactactatcgcgaagtggctttgaaagcgattcagaacgcgccggaaacccgcggcgagcagattgcgcgcatcaatcacgatatgcgcgaagcgctgctgaccgttgatgtcaaagccaacccggaagcggcgtttaccatctggatgaagcactatctgcgccgggaaaatagctatatgcagaacgagtcgcagcaggaaaaattccatacccgcgagccgttgaccttaaagcagtttatcgaggagccggataccggcggctacgccggcgtggcgctggatattctggaggcggtgaacagcaccaccaccaagcgcatcgtggtatcgatgcccaacaacggcacgctggacttcctgcgcccggacgatgtgattgagatcagctgcgacctgagcaaagagggcctgaagccggtgacgccgaagcatgtgccgacggcgcagaagaatatgatcgccagcgtgaaagagtatgagcggctggcggtggcggccattctgcagcgcgataaatcgctggcggtacgggcgctgatggcgcatccgctggtcggctcttattcgctggcaaaaacgctggttgaagcctatctcgacgataagcagttcgccgactggcaataaacgcccggtgaaatcccccggatggcggctaacgccttatccggggaatgtgccgggcctgagacatctactctgttgcatcccggtggcgctgcgctgaccgggctacggattcaccgccgtctgcggatcggtagcccggacaggcgcctcaggcgccgcctccggggatccccgtctgcataaaccacatcttcagcagccgctcaaagccgagtatgcagtagccaaaaaaggggttactccagtaaatatcatcatcgaatttctgcggatcatggatgataaacgccgtatccgccgcctgcgccagcgggctttgataatcgccggtaaagcagaccaggttaatctcctttccttccagcgccttcacccagttcagcgcggaactgctgcgtccggatttggaaataatccagatcgaatcaaatttggcggcgttcttctgctcgaggatttcgtaatccggccacagcgcgaggctggcattcaccccggtcaccaaaaatttattataaatatactgggcgatcagctgcgaaaacccactgccgtgaatcaaaatgcggtgatgttgcaggctttccagcaatggcgttatccgctccaccggctgaatgctcatataatcgatgtcgttggtcacatcgagtttgggcatagtgatattgaatttaataaaatagaccagctccagccagccgctgaatttcagcttcttcgccaggcgtaccagcgaagacggattgctataacagtgctccgccacggcgcggatcccttcgcgaacgcattgctcaggatcgttctgaataaaacgcagcacggtcatttccgttttgcttagcttaacgtcacgaaagatgttttctaaatccataccgggctcctctcagcgctaaactacgctatcacccggcggctctggcgtctgtggcatcaatcaccagaatgaaatgaacgttacttttttacacaaaatggaataaaaaaaccctccggtaaagagggtgatggattcgacaacgtctatctcttttcagcgccgtattcactgcacaataaccattttttcggttcatcttcctgaatcatcgggaagcggccgctatcttccagaaaacggttgtcgcgcttatcatcgttcaccatcgaaatttcccagcccatcaccagcgcgttttcagcccaaaaacggtggtacagcgtgggcggcaggcaaacgccctgcccggggttaagaaccagggtgtctcccggtttcagcgtgcgctggaggccatcaaccgcgacgctcacgctgcgctgcatatccagccgttcatcttctgtcgcccatgccagctgcagacagagccggccgccgccgcggttcagaatatcttccattttgtgataatgaaaatgccagggggtttgctgatcctgctgaatctgcaacatcttctcggcgtagggcttgggatagcgcgaatcgcccggcgcgccgttacgcagggtcaacagcgtcagtccggtttcctgaaaacggccgctgccaaaatcggtaatatcccagccaagctgtagatcccgaacttctcgccactcttcaaaccgctttttcgcccagatatcggcggtaaagcaggcaaactcgggtaagcaaatgcgaaaggactcggcgatagcatgcgctttatcaatcgcgtagttaatctgtgaacgtttcattttcgactccgcttcggacggccagccaggcggcgccgcgcatgccgctactgtcaccatgtcgggcaggcacgatgggggtggtgaaatggtcggtaaacaccagcggggcgacatccgcctccaggtcgttcaccagcagcgccacgttagacagaccgccgccgagaacaatcacgccgggatcgataagattcaccaccgtcgccagcgtccgcgccagctgctggcgaaagcgcagcacctgctcgcaggcggcatgctcgccctccagcgcccgggcgataatagcctgactgctgagcgcctgccgggtcatcaaacgatagcgcgcgctcagcccggtgccggaaataaaggactcgacgcagttatattttccgcagtagcagcgctcgggcggcccatcgttgacctcctgatatcccggcagcgtgatatgcccgcactccgccgcaatccctgacgcgccggggaaaatctggcgattaagcgcaataccgcccccgcatccggtccccagcgtcatgccaaataccagcgaataatcggcacctgcgccatcacaggcttctgataaggcgaaacagttgccatcgttcgccagcacaaccggctggcccaggcgctgctcaagctcatcctgtaagcggcagccgttgatgacctgaatattggcattgcggatcttgccggtctgcggggagatactccccggcagagcgataccgatagccaaaggctgagccagctcatccccaatcgcggtgattaacgccaccagcgttgcgataaactgctgccgggtctgttttcgcgtttcaacgcgaaaacgcttccattcatggccttgttcatccatcactacggcggcgattttgctcccgccgatatccagccccaaatacttcataccggcctccttattcatagcgaggcaggtttccccgccccgccgggggattagtacaggctggccttgccggtagagccaaagagcttcattttgtggcgaatcaccttccgcgcggcgttaataggttccggataaatgacattcggatcccaccatgtctcttttgtcagaatttcgcgcactttctggaaataggcatatttcatatcgctggaaatattgattttgccgacgccaagcgtaacggattccgcaatttccgcatccggattagccgagccgccgtgcagcaccagcggaatcgacagacgcccggcgatatcgcgcagaatgtgcatctgcagctccggctgcatccccttcggatagataccgtgcgcggtgccaatcgctaccgccagcgtatccacgccggtacgggcgacaaaatcttccgcctgcgccgggtcggtataggtgacttctgacacgccgccttccacagaggttccggtctggccgatggtccccagctcaccttcgaccgacacgcccaccgcgtgcgccagctgcaccacttcgcgggtcagggccacgttttcttcataaggcagcagcgaaccatcgatcatgaccgaggtgaagccacactgaatggcgcgcaggacatgttccaccgaggcgccatgatccagatgcagggtgaaaggcacgcggctgcgctgggtgatatcccgcacgtagctaaaaaacgcgtcgccaacaaaatcgtgctcgctggggtgaatagaaataatcgccggcgtatttgtcgcttccgcctcttccaccacggcgcgaataaaacagctatccgccacgttaaatgcgccgatagcaaaaccatgttcacgggtgggtttaagtaattcgtgcattgaaactaacatcgttattctccagtttcagggtgtggtaagccctgccagggcatacgggcgccggcatggaaggccttactgagatttaatcaggctttgttgattgagccggatgcgtgtaaatagggaacgatggcgtcagcgctggcctgctccatcaccgatagcgcatcggccagctcaatggtgctgtcgtggcacagggtgtgcagcagcgccgctttccccgcttcaaatacccccgccccaacgttgatttttgcgaccccgaattccgggcaacgttgcagctgctcgaacggcgtaccgctcccgccgtgcagcgccagcggcacggatgacgcgcgctgtatctgcgccaggcggtcgaaatcgagcatcggttttacgccgggggcgtacataccgtgggcggttcccacggagaccgccagcaggtcaatcccggtctgttcgataaagggagggacgtcctgcggctgggtcattaaatcggcattgctggcctggtcgtagcgcggcgcatccgccaggtgccccagttcgccctccacgcacagcccaacgctggcggccagttcagcgacctctcgggtctggcggatgttctccgccagcgcgaacgccgaagcatcgatcattaacccgctaaatccggcgcggaaagcctgacgtatttttatcggatctttgccgtgatcgagacttaacgtcacgggtacgctcgcctcctccgccagtaccctgactaccgccgccgccgtcgtcgccggaaagtgcgacagatgcccctgatacaggttgagaataatcggcgcgcgatgtttttccgccacgcgcaccgccgcgcgtgcgctttccaggttcatgcagttaatcgccagcagggcataccgttcacgccaggctttgatcaccatacttttcatatcggcaaacatagggcctccgtttattcgagggtaaaggtgatttcgtcgtctttgaccttttggtcgttcagctcatcaaactcttcatcgcgctcggttaccggctttttccacagcgagagcatcacaccgcaaatcacggtgccaatcgccagagagaggcagaacagcaggggatgcgtaaagagcggcaccacaaacattccaccgtgcggcaccggactctccacgccccaggtcatgatcaggccaccggccaccgctgacgccaccacgcaggatcccacgacgcgcagcagatcgcgggcggcgatggggatcaccccttcggtgatcatgcagatccccatcgggaacgcggccttcagggcttcgcgttcggcacgggtatatttatggcgggtcagcaggaacgagagggtgataccgaacggcgggattatcgaacccacaaacttcaccgcttccgggccgtaaacgccgctgaccagcagaccatcggcaaacagcgacatggttttattcaccggaccgccgaagtcgaaggtcgccatggcgccaaggatggcgcccagcaggaaacgcgagccgccctgcatcgactccagcatgtgaatcagcgcgtcctgcagccaggcaatgggcttgccgatcagggtcatcatcagcaaaccgctaatgatggtgcttaataccggcagcaccataatcggcatcagcccctgcatcgacttcggcagccgaatatagtgttttagcgccagtaccgtgtagcccacgaggaatccgcccagcatgccgccaataaaaccggtatgaatttgcccgcagacaaaacccacgatcaaacccggagcaaatccaggacgatcggcaatggagtaagcgatagcggcgcagatcaagggcacaatcagccccattccccagccgccgatttggtttaacatccacggaatggtgccggttttctcgccaacgttcgtcccgccaaggacttgtcccagcgcgatacagatcccggcggcgacgatcagcggtatcatccatgaaataccagttaataaatgcttcttaatttcctgtgagacgggaattttattctcactcatggtagatccctccagattaaggatcaggcattcgctaaggatttttcgaccttttcgataaactgaatcggcgacttaatcacgacttccgtttttactctgacaatccgtttatttttaaaacgctcttcgcctttaattttcacatcaatggcaagaataacgacatccgcagcgtcaatatcttcggccgccagttcattttcagtaccaatggttccctgggtttcgactttgacattgtggcccagcgctttcgcgcctttaatcagcttctcacgtgcaatataagtatgagcaatacctgcggtacaggcagcaacacagacaatattcatctcggactccgctagttattgttagtaaatgtccgactcggcatattggttaaacagatcaataatcctctgcggactggtttctttgagcagttgttcaataatgtcatcatccgccagcgctccggcgacctgggacaacaggcgaatatgggtggtattttgatcttccagacgaacggcaaataaaataatgcagcgtacctggctgccgtccagcgtttcccaggcgatatcctgccgggtgcgaccaatggcaagggtggtattaacaacggcggacgactttccatgcgggatcgcaatatgattttcaaaccccgttgagccttccgactcacgctgccagacatcctgaataaaggtttctcgacagcttatcgccccgtctttttgtaataagtcggttaactcctcgatggcttccgctttattcgtagcgtgcatatctaacaaaacgcgtttggtgtttaaaatcctggttatgtccatattctttacctcatggatataaaacttcattatctacagcagatattgccgcgcgatgtaatttgtcggtaacgattttttccgtaacccgccggatatcggcatcattaaaaaatgcgctaacatagactaccggcagagctatttccggcagattgatcgtcgaaataaccagttcaatcttgtcctgcggctgaagggtatgcaggctgcttgccgaaaccacgccgacgatggtccagtcaggaaacgctctcaacactctacttttcaacaggtgagatgtgccgattccggtagaacaaaccagcagaacgcgcttgctggcgacctgtctttccatcgccgcctggaaatgaacggtgagatagccaatctcgtcgtcggaaaccgcacgctcgccccagcggctaaaaacctgattgaccgcccgctgggtgagcggccacacgtccgtcagctcgcccttgatatcctcaagcagagggttacgaatataaatccgaaaattaaggcggttaatgagcggcttgatatgaatgagcagaccatcgtataacgcgcgatcggcggttaaatcgagatcaatcatggtggaaaaagcgctaatcaggcgatcggtaatttgtcgggcctcatcgctagaatgcatatagcgcaccatgctgacatcatctcgctcttccaccacaacgccagaggagatgatgtactgataaataaaccagacttcatcttccggcagcgaatggtcaatacggtgttcaatttttcgcagcatattctgggcaacgctaaatatcgtctcatcaaaaatctgctgcccctgttcacgccgcggtaaggcattcccacgagtaatgcgatacatcataatgaggatatgggtaaaaatattcacataatacggttcgcctaatgaccagcacagcttgcgctccatttcctgtaataatgactgaacaaataaaacgtcatcctcaccaaaataatgcaccagcgctttatagcttcctgagtccagccgggaatggataatacagccgggctcattatgattaatcaccccattaattaacgacgccatcgcctggcggacgctgttttcgctgccttcaatatgcgtcccgctctggctacgaatcagcgttaagccgagcggagcaatccatgactcaataattttcagatcattaacgatagatgcactactgataaaataacgctcagagagcttattaattgatgtctcccgcggagtctcacttaagagctgcgaagcaattttcacacgccgggagttattcatcatgacatcgctgtcctccccttcgttaccgagtaattggtctaattgcagcagatccgtgacattatcagcgatcagcatcacgccggtgcctgagcgtttgtcgatagtcattttccactcagataaccactgttctaaaaagcgtaaatcacgctgaaccgttttttctgaaacatttaaatattcagcaattttcagcagcgtaacgtattctctgcggggcaggagaaatttcaataatctgttctgtcgtgaggtaatcatttgcattatttacccttattgcataccagattaatgtctggaggccagcgcgataccacgcgagcgctacataaatcattgaggataaatataagtagcagaggcgtaaacaacaatactaaattttgtccagacatccggacagaaataaaacgaagagagggattaaggaataattataattcagatcacatttcaggaagaaatatacgtgatagcgatctcaattcatcataagaatatacccgggaatggttaaccgcctttagcctgacagcattcccggaggcggcgcttgacgcgccttgtccgggctaccggcgtgcagacggctggaaacctgtagcccggttaagcgcagcgcgagccgggaagcagctgcgctgatgcatcaggtttggcaccttccccggaggcggcgcttgacgcgccttgtccgggctacggcgtgcagacggctggaaacctgtagcccgactaagcgcagcgcgagccgggaagcagctgcgctgatgcagcaggttcggcaccttcttcccggaggcggcgcttgacgcgccttgtccgggctacggcgtgcagacggctggaaacctgtagcccgactaagcgcagcgcgagccgggaagcagctgcgctgatgcatcaggtttggcaccttccccggaggctgcgcctgatgcgcctgtccggctccaaagcgcttacagcgtaaccgtcaacgcattgctctgcgcggtcaccaccacgcccagctcgctacccgcctgagcgccgccctgcacgcccgccacctgctggatgttgcgcaggcacagcgtccagccgctggcctcaccgtcaccgctgacggtgatgacgttgccctggcgtttcgccgtcagggtaaagaccaccgacccgtccgcggccggcacctggcagacggcttcgcgaccatcgtcgaggctaaacagctggaaggcggtaccttcgttccacgcgtagtccggcttctggtcattgtttcccagcgccagcagagtgttgtcacgcacgtacaccggcaggctcagcacatcgtgattctgcttatgccagcggctaccctgcgcttcatcgttgtgccacagatgggtccagcggccttccggcagccagaactggacgtctcccgcttcgctaaacaccggcgccaccagtacggaatctcccagcatgtactgccgatccagatagtcgcaggccggatcgtgcgggaattccagcatcatcgaacgcagcatcggcgtaccgaactcattggccagcgccgcctgacggtacagatacggcatcatgcggcatttcagctgcgtgaagtggcgcaccacgtcgcaggactcgtcatcgtaggcccacggcacgcgataggatttgctgccgtgcagacggctgtggctcgacagcaggccgaaggcgcaccagcgcttgtagacgtgagcgggcgcggtgttttcgaagccgccgatatcgtggctccagaacccaaagccggacatgccgatcgacaggccgccgcgcaggctttccgccatcgattcatagttggcgtagcagtcgccgccccagtgcaccgggaactgctgcgcgcccaccgaggcggagcgcgcgaacagcaccgcttctttctcgccgacggtctctttcagtacgttccacaccagctcgttatagatgaaggcgtagtggttgtgcattttctgcggatcggaaccatcaaaccactgcacgtcggtcgggatacgctcgccgaagtcggtcttgaagcagtcaacgcccatcgctaccaggcctttcagcttgtcggcataccactggcaggcttgcggattagtgaagtcataaatcgccaggcccggctgccatttatcccactgccacagcgaaccgtccgggcgtttcagcagatagcctttctcctgcagctctttaaacaccggcgaacgctggccgatataggggttaatccacacgcagaccttcagccctttctctttcagacgcttaatcatgccttccgggtcagggaaggtcaccggatcccattcaaaatcgcaccactggaaggccttcatccagaagcagtcaaagtggaacacgtgcagcggcaggttgcgctccgccatgccgtcgataaagctgttaaccgtcgcttcatcgtagttggtagtgaacgaggtggtcagccacaggccgaaagaccaggccggcggcagcgccggacgcccggtaaaccgggtatagcggttcagcacctctttcggggtcgggccgtcgataacgaagtactccaggtattcaccttcgacgctgaactgcaccttagagactttttcggagccgatttcgaaagagacgcgctcaggatgattcaccagcacgccgtagccgcggttggtcagatagaacgggatatttttgtacgactgttcggtgctggtgccgccgtcttcgttccaggtgtcgaccgtctggccgttgcgcaccagcgcggtaaagcgctcgccgaggccgtaaacggtgtcgccgacgccgagatccaggcgctcaaacatatagttacgattcgttttcgtatcctgcacgtagccgtcgtttttcagctggctaccggtaatccgcacgccgtcgcgcaggaaatccagcgaccagaagtcgcctttcgtgacgcgagcggtcaaattgccgctcttcagctcggcatactcagcgccgttgttaatctccaccttgacgtctttcagcacattcagcgggtaatgcgggccgttgttcaacgcgccctggaagtgctccatacgtacgccaatcaccccttcctgcggagagaagaagcgcacggtaaatagcggaacgtccagctgggcggcacgctcgcgcacttcgcgcgacgcgacgtagaccaccatgtcgttgccctgttgctcaacctcgtacacctgtacaggttggatcagattgagccctggttgaataagccagtttccatcactgattttcatgaatagcttcctcttagttttgcaattctttgccgttcggcgctgaaatgaattcctgttcgttgcggcgcgcgccctgagccagctccgccatcatctttttcaggaacggggttttcagggtgtagtagcgtttcgcgataaccgcgctcagcagataacagaccgccggagcgagggtgaacaatgagatgatgatggtgatagtggcgctgttctgggttttggccgcggcatcgtaaccgccgcccgccagcatccagccaatcagcgcgccgcccagcgccaggcccagcttgagcacgaacagggtgcccgcaaagctgatgccggtcaggcgtttgccgttacaccattcgccgtagtcgacggtgtcggacatcatcacccactgaatcggcgtcaccagctggtgcagcacgccaatcacgaagataaaggcgaacatggtgatttcggcgtccatcggcacgaagaacatcgccacactcagcgccgccagcagggcgttagtccaccagaagacgctgactttgcatttccagtcggtgagcggcttcgccagcgccgagccaatcaggttgccgacgcagtaggtggtgaggaaggcggtgaacagaccagcggaccccataatccaggtggtgtagtacatcatcgcgccgccgcgaacgcagaccgcgaggatgttgaggatggtcagcagaccaacgacacgccactgatcgttgcgccagatatcgcgcaggtcttcccgcattgaggtagagctcggtggcgcttcgacgcgctctttggtggtgaagaaacaaaacgccagcatcaggaaagcgatcgccgacagcaccgcgatgccgccctgaaagccaaaggctttgtcttcgccgccgataaagttcaccagcggcatcatcagcacggtggagagcatgccgcccgccgtcgccagcacaaagcgccaggactgcagggagatgcgctgcgttgggttgtcggtgatgaccccgcccagcgcgcagtacgggatgttgaccacggtgtagagcagggtcagcagcgtgtaggtgaccgcagcgtatatcagcttgccgttatgactcaggtccggcgagctgtaggccagtacgcacacgaggccgaacggaatcgcaccgaacaggatccacgggcggaattttccccagcggctgcgggtacggtcggccagcagccccatgcaggggtcggatatcgcatccagcgcgcgggccagcaggaacatggtgccgacatagccggcaggaataccaaagatatcggtataaaaaaacatcatatacaacatgacgttatcaaaaatgatgtggcttgcggcatcgcccatgccgtagccaatcttctctttgacggataaaatatgatctttcatcgcacactcttctctcagcgctgccgcgggttggtaccggttacatgctttgtaaaccatccgcgcagtaagatgaattgcgatatctcatattcaaattacgtttcttgttttatgtgatcccggtagcctgaaagagtgtgtaaaagtgtaagccacggattttgcaaggaattgtttaagaaggttctgtaaagtccagttttaacagtaaaaaagtgcgttgggggatgtggttaatgcaggaaagtagctataatgcgccccgcctccatgtagcaatcgaggcgcggaagatcgtcatctccggtgaggtggctggacttcaaatccagttggggccgccagcggtcccgggcaggttcaactcctgtgatcttccgccaaaattgccccacatttatcaaaaaatctacttaattttcaatagattaatcaaatatatcttttttactatttagacaggcttctaagagctgttttaatgtcacagttatcacgtgtctcccttgtggttaatgccggaacggcgtgctgtagctaccctgcacctaacgcaactgtggggggtctactaatgccaatttctccggttcagtagcacatatcacttcgtattccttccatgagtttttgcttccactttctttcatcacagcccctaatgtttctcgtcaattatacaaggcgcacactttctgaaagggattttcatattcagcatattattatgacgagttttctggtataaaaataaaataatactctcatttatttgataaatataaattgatacttatggaaggaactatatgaaaattaataatctcagtatgattgtttctatgataacaggaataatcactactattataacaatatatagcattaacaaaccggcatcacaccttacagcatacgttactgataatatattttataccccaccccaatataatgaaattatgagccttactcttgatgaagcggattataataatatttatgatcgcattgatagtgttgcacaaaatgccagatttgaagaaaaatcaaaatttgttaaggaaattattaattctattttaactccatttaaacctccatttcaaaatggtttagaggaatataaaaaattgatctttatcaatgtacataactcaggggatgcgtcagcaaaagatttatatattgactatcctgagaaggttttagttatggttatagacgacaaaaaagaacaaattaaaaaaccagatgcgcttactcgcttgtcaataccatcaataagacaaggtggaaattataaggtttgggcttgggctaaaaataataaatttaaaaaaagcgatattagaattggaaatgaaaaccaaattgccaagattaaatacggtgaactacattttggaacttcatcaaatatagcttctttttatgaaaatcatgaaacaataataaaaacaatttttacgatagtaatgtccttgggaagtctgacaatttgcttcctgctattccacttaagaaaaaaatattgaaaacagagtgaaaaaattatcccttaggttcaatacccctcgtccgcaaagcctccctcgccagctccttcaaccaactggcgagactcaccccctcttccgctgcaacagcatccagctgctcctttaatgccggatcaatgcgcattttgaactgcggagactgaccgccgccctttggttttttttcgcgcgctatgattgacatgaggccacctatccaactaatcttaacatataggaggccacctaaaagcctcttgtacaaacaacgctccgaagtgcgggaacacagccggagcgtctaaccacaccaactatcaaggagttgattatggctgattcgtattctaccccagactttgccgtttccggaaccgagcgtcacctgattgtgggatatcgcccgcaaggtcgggacaccagtacaccaagtctcaccctttccggcaagtggttacgcgcagcggggttcgataccggaaagcgcttcacagttaaggtaatggatggctgtattgtgctgctgccgcagagcgataaggaagaaatgcttaaagcggagctactgcaaattcagcaatcctttaaaagcgtcaacaacacgcttcatctcgtctgacgcccggacatgttcgccttctggatagccgctgccaaatgacgccgggttaatcgtccgtctaatgaaatttatgctcttctgacatactatgcgaaccaaagcaggttaacccggaggctatatggcaaatgaacacttaacgtcgtcccccataggcgagttcgttatgtttgccagcggtgatgggaaagtacgtgttgaatgccgctttgaaagcgatacgctttggctctcgcaggcaatgatttgcgaactctatggtaaagcgaaagccaccatcagcgagcatataaagcatatatttgaagaaggcgaacttgaggaaaattcagttgttcggttttaccgaacaactgccagtgatggaaaaaattatcaggttcaacactttagtttgcctctgatacttgccgttggctatcgcgttcgctcccctcgcggcactcagttccgccagtgggcaacccagacgctccaggagtatctgatcaaaggctttgtgatggacgatgagcggctgaaaaatccgcctgttggtacatcggctgtacccgattatttcgatgagatgctggagcgcatccgagatattcgcgccagcgaacgccgggtttatttgcgagtgcgggagatttttgcattagcggctgactatcaaccatcgctaaaagaaaccatgcagttttttcaaaccatccagaacaagttgcattttgcctgtaccggacataccgcggctgaactcattcatcagcgtgctgacgccagccaaccgcatatgggactgtccagctataaaggtgaagaggtgcataagggtgacgtgacggtggcaaaaaattatctcactcaggatgaggtcagcgaacttaatcgcgtggttaacatgtggctggattttgctgaggatcaggcccgtcgtcgtcgtcaggtctttttacgcgactggcaggataagctggatcagtttctgcaatttaacgaccgcgaggttctgcaaggtgcaggtaaagtgggtaagcaaatggcagatgaaaaagcgcaggcggaatatagtcagttttccgagcaacagcggcgtttaaaggaagccgagggtgagaaggatattgctgctttgctacagtggaaaacagagcctaaaaagtagcactgaggattccgattctcacgaataaaatcatttggctaaacctgttttatctgctgtgctcacctttctgccgggcggcgccttgcccggcctacgcgatccgggattatctttgggcctgtgtaattcccaccgagctgcgctgcatggcgtttagttagacaatcccagcttctgtgacagctcgctcagttcacgcatcgccgccaggcttttttgtttccgctgttccgcagccaccttctcctgcaccagctccgccaccctctctggctcctcagacgaaaccacccggcaatcgtctaatgcacaatattccctgaagcgctggcggaacttcatctcttctttttctctgaccagaccaaagccgcgtgtcagctggcgcgcgaccactatgcgcgtagcgatatcaatatcctctgaaggcagtagcaggatggagtacccggactgccgcacaagctgtcgattcccgacgacaatctccgggcagacatcggtggcaagaaatcccgatgagagcaccaccactcgtttttcatgcggattctccgccagcaggcgagagcatagcgcggcgttatcacgcacatagcgctcgtatccattgcgctgaatatattggcgaatatttaaaatctgctcgcaaaattctctatcgagatcgataaaccggtagctcatcgcctgcgcgagcagcgctccaaccgtgctttttcccaccccgccggggccaatcagaaatagcgtattcatctttattcctcgcgtccgtgtgaaagcattatgtcagcagaatacgccaaataattccgcggtcgcggccgttttttgttcacttccatctccccagccaattatttccatccaatgtttgcgttattcccttcacctttaaatccttacactaacgggataacgtggcttagaaaggagaccaatgatgacacccgaactcgaacacagcttctctatcaccattcaggtcgacaaaccggtcatcgtctcccgcagcccgcagagcgggaaacgtcagctgatcccaatcctgagcggaaccgtacgcggtgagcttaacggccacgtcttacccggcggcgtcgacagccagatcgtcgaacctgacggcacctgccgcctctccgcccgctatgcattacacgtggaagaaggcacggtatacatcgaaaacaacggcattcgccgcctacccgaagagtataaagaacggctattcggcgacgatatgcgcttttttagcgatattccgccggaagctatctattttcgtaccgtaccgacttttgaagtggatgcgccggcgctgcgctggctcaccacctcgctgtttatctgttccggcggccgcacgcaggacggcgtgatgctcgatttttatcgcgtccgctgattttcacgttttcaatataactgttatcgccgtcgggccatttttcccccgcgtgccgcggtctatcctcaatacattcaaacgatgaaccttattcaaaaccggagagtgtatgaaagcgatcgccattacccgcgcggcggcagaaggcagcaatattccttttttaaccgacatcgagctgccgcagccggttgccgaggggcatgacctgctggttgaagtgaaggctatttccgtcaacccggtggataccaaagtccgcgccgggtttaacgccgataccccgcgcgtgctgggctgggacgcggtgggcgtggtgaaagccgtcggcagcgcggtgacgctgttcgccgcaggagatgaagtgtggtacgccggcgcgctgggccgtccgggcagcaacagcgagtttcagttagtggatgagcgcatcgtcgcccgcaaaccacgttcgctggataatgccgccgccgccgcgctgccgctcaccgccattaccgcctgggagctgctgttccaccgtcttggcgtagaggaaggcggcaacgcgggtgacacgctgctgatcgtcggcgcggcgggcggcgtcggttcgatactgacccagctcgccagcaagctcaccggtatgacggtcattggtaccgcctcgcgtccggaaagccagaaatgggtacgggaagcgggcgcgcatcatgttatcgatcacagcaaaccgctcgccgaagagctggcgcggattggcgtcaaagcggtgacccacgtcgccagcctgaccaataccgaccagcactatccgcagctgatcgccgctctcgcaccgcagggcaagctggcgctcattgacgacccggaaaccctcgacgtggtgccgctgaaggcgaaaagcatctccctgcactgggaatttatgtttacccgctcgatgttcgcaacgccggacatgatcgcccagcatcagctgctgacccgcgtggccgcgctgattgacaacaacaccattaagaccaccctcggcgagcactacggtgccatcaccgccgccaacctgcaaaaagcgcacgcgcagctggaaaccgggcgttcggtgggcaaaatcgtgctggagggcttttaagatgagcggcgaggcgatttcacttctcgcggtgctgacggcgaaaccgggccacagcgacgcgctgcgccaggccctgcaggcgctgctgctgccgacgcgtcaggagccaggcaacctcgattacgccctgtttcagctgcgcgatgcgccggatacgttctatatgcgcgaatcctggcgcaatcaggaagcgctggacgcgcatatcgccctgccgcacttccaggattttattgcgcagatggatagcctgcttgccgggccgctgcggctggattatctgacgcccgtcgcgccctgatattttctgcactccgtttgcgggggtgagcctatctttaaccctttgagctctcccccacccatcgcgcctcaaccaggctacgcttgatcctgccgctcaaaaaacgctctccccctcctttttattcaacgccgttatgtagaagaggttttgctatgcagatcaacgctattggaacgaactcggccagccagccgttggggtctatggccatcacccgccgcgaaccggggccggacgatgtgcagatcgccattgattattgcggcgtctgccactcggatgtacaccaggcccgctccgagtgggcagggacgctctatccctgcgtgccgggccatgaaatcgtcggccgggtgaccgccgtaggcagccgggtctccggccacgccgttggcgatctggtgggcgtcggctgtatggtcgacagctgtaaagagtgcgaggagtgccgggacgggctggaaaactattgcgatcgtatggtgctcacctataacggcccgacgcaggacgcgcccggccacacgctcggcggttactcccagcagatcgttgtgcatcagcgctacgtgctgcgcgtccgccatcccaaagagcagctggccgccgtcgcgccgctgctgtgcgcgggcatcacgacttactcgccgctacgccactggaacgtcggaccgggcaaaaaagtcggcatcgtgggcattggcgggctggggcatatgggcatcaagttggcccacgccatgggcgcccacgtggtggcctttaccacctcggaatccaagcgtgacgcggcgcgggagctgggtgcggacgaagtggtggtctcgcgcaacgaaaacgaaatggccgcccacctgaagagcttcgacttcatactcaacaccgtggcggcaccgcataacctcgatgccttcaccaccctgctcaaacgcgacggcaccatgacgctggtgggcgcgcccgccacgccgcatccctcgccggaagtgtttaatctgatcttccgccgccggtcaattgccgggtcgatgatcggcggcatcccggaaacccaggagatgctcgatttctgcgccgagcacggtatcgtcgccgatatagagctgatacgcggcgaccagattaacgaggcctgggagcggatgattaaaggcgacgtgaaataccgcttcgtcatcgacagcgccacgctcggcggctaagccccgcgacgaaaagtgcgccgccactccgccgggctgacgccaaagcgcgctttaaactgctggcgccaggttacggcggagcgatagcccacttcctccgccacctgcccgaccggtaaatccccggcctccagcaggatctggctgcgccgcaggcgctcggcggccagccagtcggcgatgcccatgccggtcgctttggcgaaatggcgggtcagggtccggcggctcatcgccgcgacctgcgccagcgagtcgagattatgcggttcgcggatgtgctgctggagatactcaagcaggccgtttatccgcgcgtcgcgggtgtttttgggtaccggctgggcgataaactgcgcctggccgccctcacggtgcggcgggacgatcatccgccgggcgatctgattggcgacaaggctgccaaaacgctggcgaatgagatacaggcagcagtcgagcgccgccgcggtgcccgccgaggtaataatcccctcatcgtcaacgtacagcgcgttgatatccagccgcacctgcggaaactggcgctgaaaatcctgctcaaactcccagtgggtcgccgcgcgcctgtcgtccagcagcccggcgtagccgagtacaaacgccccgaggcacaggccgacgatctgcgcgccgttattgcgcgcgcgaaccaggccgtcaagcagcggctgcgatgggcgctgattcaccgccccccagtaaggcaccaccacgatatccgcctgcgccaggagggaaaaatcgccgctggcgttcagcgcgaagccgtcgcgggcgctgagcagccccggccgttcggcgcaaatatgcaggttaaagcgtttggtttccgagaccgtatcgccaaacagcatacagggcaccgagtagtgaaacgggctaaacccgtccaccgccacaatcgccacttccgtgagtttcatcgcccgctccgcttctaaaagaccatgctttccccatcctgcgggatgctgaccgcttcggcaatctgattgtcagccacgtactggcgcagctcatcgcggctcagcagacagtggttcaccgcttccatatggctggcgacgattttggcttccggcaggacgaagtgcgccttcagcacatcctctttgcccatgatgatcggcccaaaaccgatgacgtgcgcataccccgcattcagcaccaccacgtcagggcgcagcctgagcatgtcggcttccacttcatcgcgccagatagtgtcccccacaagccacagggttttctcctgcggatggcgcagcaccacgccgcaggcttcgcccaggcgctcggccattgccggcaccgcataggtgcggtcgctgccgtgctggcccgaggtggttttcaccagcgcaacgtcagcaaacgcgctgtcctcagagagcagacgaatatcgcgaaagccctggccgcgcagcagctgagcgtcggcgtcatgctggacataaaccggcagggttttggggatcgcggcgatcgccgcctcgtcccagtgatcctgatgagtgtgagtgacgataacggcatccacgtcaacgatcgtttcgatggaaaaaggcagttccaccagcgggttacgcaactcgctgcgcgcggtaccggcaaagcccgcccaggcgcctttgtcagaaagcatcgggtcaatgagaaactttttacccgcatattcaataagctgggtagcattacgcacatgggtgattttcatgatgttcattcctctttgcggttatctgctgaacatcgtacgtcccacaagcctggcgcaatatgggcgtttgggcaatgaacgatgaaatcgggccaatctgcgacggttgccatcggctcccggctatggtgtgctgaatgctcaactttgaggaacagtggctacgatgaaaaagaaactcacctccgccgatatgcacgatgtcgaggttctggcagacaccccatggttcagcatgcgcaaggtcggaattgatatggcccccggcgatcggcgggattttttctccattcactatcctcgcccggcggtgggaattgtggcgatgcaggatgacaaagtgctgctgattcgccactaccgttacctgatcgatcgggtggtgtgggcgattccttccggcggcgtcgatgaaggcgaagacccgcgcgaggcggccctgcgcgagctgcgggaagagaccggctggcaggcgcagcgcgccgacgaaattatccgctataacccctcctacggcagcagcgaccagctgtttattacctggctggcccacgatttgacctgggtgggaatggatgaagatcaggacgaagtgatggaaacgggctggtttaccctcgaagagataggccagctgatcgcccgcggcgagatgccggacgggctatcgctggtgccgctgctgcatctgatggcgcagcggcgcaccggtttagcgtagcggcttcagcatccgccagcggaaccacagctgagcgacgaggatcagcaggccgccgataattttctgcagcggtagctgttcgccgtaccacagcgcggcggcaatcaccgtgagcagcggttccagcaccataataatcgccgcgctggcgaccgccgcgtacttctgccccttcatttgcaggccgaagcgcaggctggtggcgataacgatgctggcgagcagccagccgaaggtcggcagggtaaacggctgagtccagctttcaacggcggcggagatccccagtccgacaatgccggtaatgccgagctgcacggtggtcagcgggatcagcggcacctcgcgggcgcttttgctggtgtagcaaaaccagatcgattgcaccagcgcggtcaacaggaaccagccctggctggggtgaaacgcaatcggcatatgcaggctgagtaagccgagaccgacaaccgcaatcggcaggcactcccagtaggcccgcgccggccgcgccttcatcatcacccatgcggtaagcggcacgaacagcatcgacaggctcataataaacgccccttcgcccagcgatggggtcgttgataccgagtagatccacaggcacaggtttagcgcaaaccacaggccgctgataatcatgcgcggccactgctgcctctcgacgcgaaggccgcggcagaaaggcagcagcagcagcgcggcgaataaaaaacgcaggccgaggaaagcgaaaaccggcatgccggcaatcgcttcccgggaaaaaatccatccgcaggcggcgataaccgtcgcggctatgagcagcaaatcagcctggcgttgccgggtcatcgccacgtctccttgtgtgagtgattaccagccgggcaccgcgccgccgttgaagatcgtctccgccgccttcgccacctcaggcgactggtaggagtggataaacgctttgacgttttccgcgtctttgttgtcttcgcgggtcacgatgatgttcacatagggcgagtttttatcttcaataaagataccgtcgcgcaccggggaaaggccggtctgctgcaggtaggtagtgctgatgatcgccacgtcgaccttcgggtcgtcgatgacgcgcggcagctgcgctccttccagctccataattttcaggtgatgcgggttgtcaatgatatcaaccgccgtcggcagcaggccggtgcccgctttgagggtaatcagcttttcctgctggagcagaagcagcgcgcggcccaggttggtcgggtcgttcggaatggcgatggtcgcgccgtctttcagctcggcgacggattttattttgcgcgagtagcccgccatcgggaagacgaaggtgttgcccaccgccaccaggcgatagttgtgggctttattatcctgttcgaggaacgggcgatgctgaaagacgttggcgtccagatcgccggcgttggtggactcattcggcagcagcgagccgctaaagcccaccagctccacgtcgaggccatatttctctttagccactttcttcgccacttccgccacatcctgttccgcgccgttaatgacgccgactttaatgtgtttcgcatcgctgcccttctggtcgcagcccgccagcagcaggcccgccagcatcacggcggcggctgtccgtaaacgcaatttcattgttatcaccccgtcagtccatagaaatcgttattattttttcgtctgaaactataacgactttgtgctggggttttaaacgcaaaaaccgcaaccggaaataaaatcatcttccccctttctcccgggggcggcgcgatgcgcctgcccgggctacgggttcaccgtcggctgcgatcgagtagcccggacaggtgcgcagcgccgcctccggggatctcttcaacggtgaggctcgttccgcagaacggcgccttacagccccagctcactcagccccgggtgatcgtccgggcgacggccctggggccagtgaaacagacgctcgctctccgtaatgggcagatcgttgatgcaggcgtagcgcgtctgcatcagtccgtgctcgtcgaattcccagttctcgttgccgtatgaacgaaaccagttgccgctgtcgtcgtgccactcataggcaaagcgtaccgcaatacggttatcgctccacgcccacagttccttaatcaaccggtactcctgctctttacgccatttgcgctgcaggaagtcgataatctgcgttctgccgtgaacaaattcgctgcggttacgccattcgctctcgacggtataggccagcgcgaccttagcggcatcgcggctgttccagccatcttcagcggcacggactttttgtgcggcgctctcgcgggtgaacggcggcagaggcggacgttgttcggtcatcatgaatctcctgtatgaatacccttcatacttcaagttgcttatgtgttggctacactcgttcaccccagtcacatagttatctatgctcctggggactcactcccttgccgcctttaagcaactcgaattattttgggtatataagctgctgcaggcgctgattttcccgctccagttcgtcaatacgctgttgcagcgtctggctatactccgccacctgccgggcggtgtagcggggggtaatatgctgcgggcagttccagtcaaaagcctgtaagtggaaacggtagatgcgctcaatccgggcccgatagttctccggcgcgacctgcgccagcagctgcgggtcggcatccaccgccacaacctctacggtggcgtagattttcagcctggcacggcgcgggtaatccatcaaaaacagacaggcccgatcgctgccgcgcaggttgccggtggtgatgtactggcgattaccggaaaaatccgccatcccaagggtggtttcatccagcagatgcagaaagcccaccgggccgccgcgatgctgaatatagggccagccggtttgcgaaagggtggccagatagaagctgtcgcgggtggcaatcatcgcctcctcgctggcgccgaagcgctcaccccggcgctggcgatgcggcgactgccacagctcatcgctgcccatttcatgctggacatccatcacgtccggcgtcatggcgatatcaagaaattctgctggcataggtcctcccgatgcgttgcggcataactcatcatggactgtgctggcagaaaagataatagtggcaatatgacaatcatctttccgtaaaacgggataattatggaccgactcagcgcgatggcgctgctggtgaaagtggccgaactcggcagcatgtcggctgcggcgcgggcgctgaatatgcccctgaccaccgttagccgccagattggcgaactggaaaataccctcggcgtgcgcctgatgatccgcaccacccgcaagctgacgctgaccgatgccggcgtcgattatgtcgccgccgcgcggcgcattctcgaagaggtggagaacgcagagcgccaggcggcgggcgaatatcaggagccaaaaggcgaactggttctctcggcgccgaccatgtttggccgtcagcatgttttgccggtggtgacggattttctcgcccgctacccgcagattcgcgtccgtttactgcttagcgaccgcaacgccgatctggtgggcgatcatattgatttagcggtgcgtatcggtacgctgccggacagcgggatggtggccacccggctgggcgagatgcgcattgtgacctgcgcgcacccggctttgctggaaaaacacggcatacccgaacgcccgcgcgagctggccgcgctaccgatcattcgtattgaatcgccaatgccttatcgcggctggcgctttaatgccgaagaggcggaggaccggctggtggcgctgcagccggtgctgtcgctgaccacgccggagagcgccgccgacgccgcccgcctgggggccggcgtggcgcgcctgctgcattaccaggcgatcgacggcctggcccgcggcgagctgaagctgctcctgcaggcgatggaaccagagcctgcaccggtgcacctgctgtacacctcgcgggatctggctccgcttaagctgcgtaaatttatcgatttcgccgcgccggctctgcgtcgggcgctgttgcgtattgccgccgccgtctagcgtgtgccggttttcagcggcgcttctttcagtagccaggagagggcaaatgccaccgccataatgcaggccgccatcagaaacgccgcatggatagcggacccgaaagcgtccagataatcgaggcggatctccgccgggagattctgcaccgccgccgggtttagcgccctcggcagctgcgccccttccggcagcaggcgctggagattgctttgcagcacgtgagtaaacaccgccccaaacagcgccacgccgatggaaccgccaatcgatcgaaacagcgtgaccccggaggtcgccacgccgtacatctgcgcgggcatcgcgttctgtaccgccagcaccagcacctgcatcaccagccccaggcccgcccccagcacgccggtaaacaggtacagctgccacatcgcggagtggatggtgatgcgcgtcagcagcaccatgccgacgacccccagcagggtgccgataatcggaaatacgcgatacttgccggtgcggctgataatgcgcccgctgacgatcgaggttagcagcaggccgcccatcagcgggatcagctgcaggcccgcctcggtgggcgtcgcctctttgaccacctgcaaatagagcggcaggaaggtcaccgagccgaacagcgccatgccgataacaaagccaatcaggctgcacagcaaaaagctgcggttgcggaataaggagagcggaataatcggctcgctggccagccgctcttcatgaataaagccgacgatcccgaccaggccaaacgccaggatgcaccacagctgcgggtcgctccacgcgcggacgctgccgccctcggaggtaaacaggatgatgcacagcagcgccatgctgaggtaaatcgcccccagccagtcgatctggtgctggctgcgcttgttgctgctgtgaaaaaccgcgccgatcaccagcagcgcaaacagccccagcggcaggttgatgtaaaaaatccagcgccaggaggcgtgctgcaccaggaagccgccgattaacggcccgattaccgtcgccaggccaaagacgccgccgaacatgccctgatagcggccgcgattcgccggcgggatgacgtcagccaccgccgccatgctgatcaccatcaggccgccgccgcccagcccctgcaggccgcgcatcagcaccagctgggtcatattttgcgccagcccgcagagggcggaaccggcaagaaacagcacaatcgccacctgcagaacgattttgcgcccgaacagatcgccgaatttgccgtacagcggcaccgcgatggtcgaactgaggatgtaggcggtgaccacccaggagagcttatccagcccgccgagctcgccgacgatggtcggcagcgcggtggaaacgatagtctgatccagcgccgagagcagcatcaccagcagcagggcgctgaagagcaggcggatcgagggcaccgccggttggctggcgatttcagatgtcatagcatcactcgcttgaaattaattaaatgcataattaatatttagggaaatgatgaatctggtcaagggatcgccacaggatgtcagcacaaaaagacaacgaagccccgcgtcgtcccggtcgcccgcgcgggcagaaatccggctccgccaaccgcgaacagctgatggatattgccctggcgctgtttgcccgccacgggatcgcccgcatttcgctgaacgccatcgccaaagaggcgggggtaacgcccgcgatgctgcactactacttcagctcgcgcgaagcgctggtggaaaagctggtcgaagagcgctttatgccgctacgcagcgagatcggacaaatttttgtcgcgcacggcgacgatccggtcaccgcttttacgctgcttattgaaaccctggcggccatggcggagaaaaacgcgtggttcgcgccgctgtggatgcaggagatcatcggcgagatgccggtgctgcgccagcatatgcacgcgcgttttggcgatgagaagtaccacaagatgctggagacggtgcgccgctggcagcgggagggcaagcttaatccggcgctctccccggagctgctgtttaccaccctgataagcctggtgctggtgccgttttcccgcacccacaccgatccgcggttgcaatcggtagaccggaagatgattgtcagccacgccctggcgctgacaggccgggggatcggcggctaattcccccggctcgcgctgtgcttagccgggctacaggttcacagccgtctgcaatccggggaatacaatccggttcacaaccgcctgcgatcgggtagcccggataaggcgacagccgctatccgggggattcaatccgcttcacagccgcctgcgttcgggtagcccggacaggcgcacagcgccgcctccgggagggtctcctgaggccaggtttacaatgctttcgataaatagtggcgctgcatgcccacgtgcggaaaacccggcagcgacatctgcagctgatagcccagcttctgataaaacggcagcgcctgaaagctgaacgtatccaccagcacgtggctgcagccgcgcgcccgcgcctggttttccgcttcatgcatcagctcgctgccaaggccgctgccgcgcgaggcttcgctgacccacagatattcaatacacagccagctgcccttgcgtttaccgatcaatccgccgcgcatcgcgccagcgtcatcgcgtgaataaacgcccagctcgccgaactgagccgggtccagaaagcgcagattgtattcccgcagtcccgccagcagctcttcttgatcggcgggattaatgttctctgttattattaatgtcattgattatctccatcttttatttttcacagaccattcaccaccctactttcacaaaatatcctttttttctccattatttcctgactaaattccctgcactaaattttgtgtaaaaaaccttcccatcattcggtacagacgtataatggggaaaaatgagaacgatcattctcaaaaccaaaaaccatggagaaccccacaagtaatgccctgtagcaggcgttatcgctcggttcagagcctgtaaccgccgtctgatgccgtattcgccgcacgggaaaatctcggaaaaaccgcttaatcaatagcggtattcaccgagttatttactgcaaacaggaatatttatttcccattgggttatttgtgcttgcccggagatgcatcatcgcccggcccatcaccccgccactgaatttgcggggcggacgtcgttcatcctgagaaaatataatgaaatatactttagcccccatcgcagcagcattatttctccttagcgggtgcgataatgcgcaaaacgcttccccgcagcagatgacgcaggaagtgggtgtcgttaccctgcacggccagcctgtcccggtggtgagcagcctgaccggacgcaccaccgcctcgcttagcgccgaagtgcgcccgcaggtcggcgggatcgtgcaaaaacgcctgtttaccgagggcgatatggtcaaagccggacaggcgctgtaccaaatcgacccatcaagctatcgcgcgacgtttaacgaagccgccgcatcgctgaaacaggcccaggcgctggtcatcgccgattgccaaaaagcccagcgctacgcggtgctggtcaaagataacggcgtctcccgtcaggacgccgatgacgcgatagcgacctgtaaccaggataaggccagcgtcgagtcgaaaaaagcggcgctggaaagcgcgcgcatcaatctgaactggaccaccgtgaccgcaccgattgccgggcgcatcgggatctcttccgtcacgccgggcgcgctggtgtccgccgatcaggataccgcgctggcgacgatccgcggcctggatacgatgtacgtcgatctcacccgatccagcgtcgatctgctgcgcctgcgtaagcaaagcctggcgagcaacagcgatacccttaacgtcaccctgactcttgaagatggcagcacctacagcgaaaaaggtcgcctggcgctgaccgaagtggcggtggatgaatcgaccggctcggtcacgctgcgcgcggtctttcccaatccgcagcacgtgctgctgccggggatgttcgttcgcgcccgcatagacgaaggcatcatgaacgatgcgatcctcgccccgcagcagggcatcacccgcgatgccaaaggcgatgccaccgcgctggtggttgacgctaataacaaggttgaacagcgcagcgtggaaaccggcgaaacctacggcgacaaatggcttatcgtcaacggcctgaagagcggcgacaggttgattgtcgaagggaccggcaaagtggcgccgggccagcaggtcaaagccgccgaagtcaaaaatgacggaggcaacgcctgatgttctcccgtttcttcgtgcgacgcccggtcttcgcctgggttatcgccattctgattatgctcgccgggattctggctatccgcaccctgccggtcgcccagtatcctgacgtcgccccgccggcgataaaaatctccgccacctacaccggggcctctgcggaaaccctggaaaacagcgtcacccaggttattgagcagcagctcaccgggctggacaacctgctctactttacatccaccagcagctccgacggctcggtcagcattaccgtcacctttgagcagggtaccgatccggataccgcccaggttcaggtacagaacaaagtgcagcaggcggaatctcgtctgccgagcgaagttcagcagtccggcgtaacggtggagaaatcgcagagcagcttcctgctgatcctcgcggtgtatgacaaaaacaacaaagccaccagctccgatatctccgactggctggtcagcaacatgcaggatccgatggcgcgtattgaaggcgtcggcagcctgcaggtgtttggcgcggaatacgccatgcgcatctggatggacccgaccaaactggcctcctattcgctgatgccatccgatgtgcaatcggccattgaggcgcagaacgtgcaggtgtccgccggtaaaatcggcgcgctacccgcctccaacgcgcagcagctgaccgccaccgtgcgtgcccagtcgcggctgcaaaccgtcgcccagttcaaagagattatcgtcaagagcaagagcgacggttcggtggtgcgcctgagcgacgtcgcccgcgttgagatgggcagcgaagattacaccgcctccgccaatctcaacggccatccggctgccgggatcgcggtgatgatggcgccgggcgctaacgccctgaataccgcgacgctggtgaaaaacaagattgccgagttccagcgtcagatgccgcagggttacgatatcgcctatccgaaagacagcaccgaattcatcaaaatctcggtggaggatgtgattcagacgctgttcgaggcgattatcctcgtagtctgcgtgatgtatctgttcctgcaaaacttccgcgccacgctgatcccggcggtggcggttccggtcgtgctgctgggcaccttcggcgtgctggcgctgttcggctactccatcaacaccctgacgctgtttgcgatggtgctggcgataggcctgctggtggatgacgccatcgtggtggtggaaaacgtcgagcgtatcatgcgcgacgaggggctgcccgcccgcgaagccaccgaaaaatcgatgggcgaaatctccggcgcgctgatcgccattgccctggtgctctcggcagtgttcctgccgatggccttcttcggcggctcaaccggggtgatttatcgccagttctcggtgaccattatctcggcgatgatgctctccgtggtggtcgccttaaccttaaccccggcgctgtgcggcgcgctgctgagccattctaaaccgcataccaaaggcttcttcggcgcctttaaccgcctgtggggacgcaccgagcagggctatcagcatcgtgttgttggcggcctgcgccgctcggcgatgatgatgggcgcttttgtcctgatttgcggcggcatggcgctggcgatgtggaaactgccgggcagcttcctgccgacggaggatcagggcgaaatcatggtccagtacacgctgcccgccggggcgacggcggtacgtaccgccgaggttcgccgccaggtcaccgactggttcctgacgaaagagaaagccaataccgacgtgatctttaccgtcgacggctttagctttagcggcagcggacaaaacgccgggatggccttcgtgtcgctgaaaaactggtccgaacgtaaaggcgaagaaaataccgctcaggccatcgccctgcgcgccaccaaagagctcggcggcattcgcgacgccaccctgttcgccatgaccccgccgtcggtagatggcctggggcagagcaacggcttcaccttcgaactgttggccagcggcggtaccgatcgcgatagcctgatgaaaatgcgcagccagctgctggccgcggcgaatcaaagtaccgagctgcaatcggtgcgcgccaacgatctgccgcaaatgccgcagctgcaggtggatatcgataataacaaagccgtgtcgctcgggctgtcgttaagcgatgtcaccgataccctttccagcgcctggggggggacctacgttaacgactttatcgatcgcggtcgcgtgaagaaggtctatatccagggcgaaagcgacgcccgcgccgtgccgtccgacctcggtaaatggtttgtacgcggcagcgacgacagcatgacgccgttctccgccttcgccaccacccgctggcaatacggtccggaaagcctggtgcgctacaacggttccgccgcctttgaaatccagggtgagaacgccagcggcttcagctccggcgcggcaatggacaagatggaggccttagccaataacctgcccgccggtaccacctgggcgtggagcggcatgtcgctgcaggaaaaactcgccagcggccaggcgatgagcctctacgctatctcgattctggtggtcttcctgtgcctcgcggcgctgtatgagagctggtcggtaccgttctcggtgatcatggtgatcccgcttgggctgctcggcgcggcgctggcggcgtggatgcgcggtctgagcaatgacgtttacttccaggtggcgctattaaccaccatcggcctgtcgtcgaagaacgccattctgatcgtcgaattcgctgaatcggcggtggaagagggctactccctgtcgcgtgccgccatgcgcgccgcgcagacccgtctacgccctattgtgatgacctcgctggcgtttatagccggggtgctgccgctggcgatcgccaccggagccggggccaacagccgcgtggcgatcggtaccggaattatcggcggcaccctgaccgcgacgctgctggcggtgttcttcgtgccgctgttctttgtgctggtgaaacgtttcttcacccgccatcgttcttctcaggagtaagttatgtttcgttttaccttagtttttgttgcgctcctgacggcgggctgcgtctctctcgacccgcactatgaacgtccggccgcacctgtcccggcgaccctgccgggtagccacggcgaggcaaccgcggtagtcagcgactggcagcaggtagtgaatgacgctcgcctcaaaaaagtggtgaacatcgccttgaccagcaaccgcgacgtgcagaaagcgctggccgatatcgaagccgcgcgcgcccagtttggcgaaacccgcgcctcgctgtttccgaccctcgacgccgagctgagccatacccgcagtaaaacggtggccagcggcctcacctcgtcagcggaagccaacggcgcggtttccagcttcgagctggatctgtttggcaagaaccaaagcctgacgcgcgcggcgcgggaaacctggcttgccagcgaattcaccgcccagaatacgcgtctgacgatgatcgccgatctgaccaccgcgtggataacgctcgccgcggacaacagcaatctggcgctggcgcaggacaccatggccagcgcggagaactcgcgccgcatcgtcacccgccagatggaagtcggcaccgcctcggcaggcgacctgagcgatgccgaaagcgtttatcagcaggcgcgcgccagcgtcgccagctaccgcacgctggtggcgcaggataaaaacgctctcaacctgctggccggagaaaccgtgccggatagcctgctgcccggcacgctggaaagccttggcgatcggagtatcaccctggtgccggcgggcgtctcttcatcggtactactgcgccgcccggatatccaggaagcggagcataatctgaagagcgctaacgccgatatcggcgcggcgcgggccaatttcttcccgtccatctcgctgaccgccagcgccggggtcggcagcgactcgctctcgtcgctgttcagccacggcatgcaggtgtggtcattcgcgccgtccatcagcctgccgctgtttaccggcggcagcaacctggcgcagctgcgctatgctgaagcggagaaaaaggggctgatcgccacctatgagaagacgattcagagcgcctttaaggatgtcgccgacgcgctggcgcgccgggaaacgctcagcgaacagctggacgcgcagaataaatacgtcgcggcggagcagaaatcgttgaatatcgcgatgaagagctatcaggccggggtcggagattatctgtcggtgctgaccgcccagcgaacgctgtggtcggcgcaggccacgcttatctccctccagcaaacggatctggaaaaccgcattaccctctggcagtcgctgggaggcggcgccagctaacgcttttgccgggcggcaacgcccggtttgatgacaaggagcccgttgatatgtcccgaatttccctctcctgggtcgtggttctcggtttgctcagcgccattgggccgctgtgtaccgacttctatctgcccgcgctgccggaaatcacccagcagctcagcgccaccggcacgcagactcagctttcgctgaccgcggcgctgattggcctcggccttggacagctgttttttggcccgctgagcgaccgcattggccgtaaaaagccgctggcgctctccctgctgctgtttatcttctcctcggcgatgtgcgcgataacctacgatatccatatgctgatcgcctggcgctttctgcagggcttcgccggcgcgggcggctcggtgctgtcgcgctccatcgcccgcgacaggtatcagggtacgctgctgacccagtttttcgccctgctgatgaccgttaacggcattgcgccggtgctttcaccggtactcggcggctggatcatcaccgccttcgactggcgtatcctcttctgggcgatggcggcgatcggcgttgtcttgctgctgctcagcctgacggtgctgcacgaaacgctgccggccaaaagcgccgcctcggctacgcggcaacaggctgatgcgccggtgctgaaaaaccgccgctttatgcgctactgcctgattcaggcctttatgatggccgggctgttttcgtatatcggctcgtcttcgttcgttatccagagcgaatatgccatgagcgcgatgcagttcagcctgctgttcggccttaacggtatcgggctgattatcgcggcgctgatcttttcccgcctggcgcgccgcttcagcgccgaagccctgctgcgcggcggccagctgctggcggtggcgtttgccgctatcaccctgctcttcgcctggctaccgcagccgacgctggcgctggtcggcctgttctttaccgtttccatgatgagcggtatcagtaccgttgccggctcggaagcgatgaacgccattcacgcccgccagtccggcaccgcttccgccctgatgggcacgctgatgtttgtgttcggcggtattgccgcgccgctggccggactcggcggcgaaacgatgctcaaaatgagcttcgcgatgaccctttgctatctggccgcgctgctgattggcctgaaaaagccgcgccccatcgcataacctcctccggggtaataaaatattccaattatattacccctatttttcccgtcagtactgtaatctcctattattccttcaacaccaatcgtgataaccttcacaggaaaggaataattaattccttatactgcccgccaccgtgaataaagaggttcctatgagtatcgacctgagcaaactgctgaccgagcgccgcaacgccaatagcgccaacattgatatcctcaccaccgaagagatgctgacggtgattaaccaggaagaccagcaggtggctcacgccatcaccccctatctgccgcaaattgcccaggtggtggataaggtcgcggcggcgctgcaggcgggtggtcgactgatttacattggcgcgggcacttccgggcgtctggggatccttgatgccagcgagtgtccgccgaccttcggcacccgcccggagcaggtggtgggcattatcgcgggcggccataaagccatactgagcgccgtagagaacgtcgaagacaacaaagcgcaaggggcgatggacctgcagaacctgaactttagcagccgcgacgtgctggttggcttggccgccagcggacgcacgccgtacgtcatcggcgcgatggagtatgcccacagccagaacgcttttgtcgccatcgtcagctgtaacccgcacggcgaaatggcccagctggcggacgtcgccattacgccggtcgtgggtccggaagtggtgaccggctcaacgcgcctgaaggcgggcaccgcgcagaagctggtgctgaatatgatttctaccggggcgatgatccgcatcggcaaggtctacagcaacctgatggtggacgtggaagcgaccaacgccaagcttatcgagcgccaggtgtccatcgtcatggaagcgaccgaatgcgatcgcgcaaccgcccagagcgcgctggaagcctgcgatcgccactgcaaaacggcgattgtgatggtgctggctgatttaagcgccgcggatgcccaggcgctgctggcaaaaaataacggctatatccgcaaggcgctgagccactcctgaccgctgactcacgggtaatctgcaatggcaaaaataaataaagagatgatagcgcggatcctgcagcacgttggcggagccgggaacgtcgcgctggcgggcaactgtatgacccggctgcgcctgaccctgcgcgatgaatcacgggccgatagcgccgccatccgccagattgacggcgtaatgggggtgatcgttagcgatgaacagttccaggtcgtccttgggcccggcaaggcgcaaagcgcggcggaaatgatgaatgcgttactggaagaagccccggcggatgcgccatcgctggccgatgtcgccgccgaaaagaaacaggcgctgaagagcaagcaaaccagcggtattcaaaaattcctcgcgaaattcgccaccatcttcaccccgcttattcccggctttatcgccgtcggcctgctgttggggttcgcgaccctggcggagcagatatttgtcctcgaaaacgcgcatccgaacgcgacattgatggcgctgatcggctacatgaaggtgttcagcaaagggatgtttaccttcctgagcatcctgatcggctataacgcccagaaagccttcggcggctccggggtcaacggggccatcatcgctgcgctgtttgttctcggctataacccggaagccaccagcggcttctattccgggatttccaccttcttcggccacggtatcgacccgcgcggcaatattatcggcgtgcttatcgccgcgattatcggcgcgtgggtggaacgacaggtacgccgcatcatgcctgccaacctcgatatgatcctcacctcggcggtgacgctgctgatcatgggcgcgatcacctttaccgtcattatgcctatcggcggctggctgttcaccgggatgtcatggctgtttctgcaccttaacggtaacccgttcggctctgcggtactggccggcctgttcctgctggcggtgatgttcggcgtccatcagggcttcgtgccggtctatttcgcgctggtggatgcccaggggtttaactcgctgtttccgattctggccatggccggtgccggacaggttggtgcggcgctggcgctgttctggcgggcgaagcacggttctctgctgcgcacgcagattaaaggggcgattattcccggctttctcggcatcggcgaaccgctgatttacggcgtgacgctaccgcgcatgaagccctttatcaccgcctgcctcggcggcgcctgcggcggttttttcctcgggctcatcgcctggctggggctaccggtcggcctgaatacggtatttggcccgtccgggctggtggcgctgccgctgatgacctccggcagcggcatctacgccggaatggcggtgtatgccgccggactggcggtctcttacctgtgcggctttgccctgacctggctgttcggcagtaaaaacgttgatttgagctaagaggcgcgtccggcgcataaaaattgaatcttttttaacccgccgaatggcgggtttatttatttctgtgtaatctacacgtgtagattacacaggagatgccctatgccagccgcaaaacgcaataagcagaacgtcagcgtgacactggacccaggcctggtcaaacaggctcgtgaggtcggcatcaatctgtctctaacgttgactaacgctctaaaaagcgaaatccacagcctcgaaatagcccgctggcaaaaagaaaatgcccaggcaatcgactacctcaataatttaactgaggaaaatggacttctctctgatgaatacaggacgttctaaatatgcagtattacgtttataagaatacaggtcgaattgctgcgtatccttacctccttgatgtacagagtgacattatcggcaagcgcaatactcgggtcgtgattccactgtttccactgaaaaactataaaggtccacgcgccgatcgtttaacaccgcttgtcaccgtagaaggggaagaatacgtcgtgatgactcacgaactcgccagcatcccacatcgtgttctgggtgaagaagtttgtaatctgaatcaccagcgcgaagtcgttaaagcttcaatggattttcttttcgacgggatctaactcgctacaagcttacgcgtcagatcgccaaacccaacgatcttccgctgcaaggggcacgcaaatactccgactaccctttcctgccccgcttcccgcgcgtactcatgctatgatactgctttcgcattattttcacctgagggaaagatgggctccagcaaaaaagggatgctgaacgtactgatcgccgccgtgctgtggggcagctcgggcgtctgcgcgcaatatattatgcagcaaagccagatgtcatcgccgtttctgaccatgacgcgcctgctgttcgccggcctgatccttctgatgctctcgttcttccacggcgataagattttccgcgtcctgcaaaaccgcaaagacgccgccagcctgctgatcttttcgctgttcggcgcgctcaccgtgcagtacacctttctgatgactatcgagcaatccaacgccgccaccgcgacggtgctgcagtttctgtcgccgacgattatcgtcgcctggtttgccatcgcccgcaaaacgcgccccagcccgctggtgctcgcggccatcgccacctcgctggcgggcactttcctgctggtgacccacggcaacccgacgacgctgtcgatttcccccacggcgctgttctgggggattgcttcggcgtttgccgccgctttttatacaacttatccttcgacgctgattgcccgctacggcacgctgccgattgtcggctggagcatgctgctcggcggcgccatgctgctgccgttctacgccggacagggcaaccattttgtggtgaccggcggcctgctgctggcctttttctacctggtggtaatcggcacctcgctgaccttcagcctctacctgaacggcgcgcagaagattggcggcgcgaaggcggggatcctcagctgcgcggagccgctgagtagcgccctgctctccctgctgctgctcggcatcacttttactctcccggactggctgggcacgctgctgattctctcatcggtggtgctgatcgccatggattcgcggcggcgggttaaaacggcctgacgattatcggccaggagaggctgcgacctgagtttgcagcatcttcaggtcgtcatccgacagctcacaaaccacctgcaccagctcgcactcaaatccctgttccagacatgaacgagcaatacgcaacgcctcttctcgtttaccttcctgaaatccttcataaaactccaggtataattccaacagatatcccagtaaatactcaggttgtaactcctgtggtatctcttccagcggtagcctctctacaatctttattaattttcccccatcttgagggatgcatcctggaatgcattcagatcgtcatcagagagcccaatagtcatccgtaccagctcgcgctcaaacccctgctccagaagtgaacgggcaatacgcaacgcttcttcttgtctaccctcttgtttaccttctaacttgccctccaacttgccctccaacttgccctccaacttgccctccaacttgccttcttgtctcccttcctgccgtagcctttccgcaatcgtcatgagtacctccttatgttgaggaacgcgccgctcgacctcgtgaagaaattcaccaaagtgaggcgcatcgccgcactgcagcatgtaattaaacagcgctttcagttggctgtcattagcgcaacctttaaccaacagctcggctaatcgctccaccaggccaagtaaatcgcgctggcgaatatgcttttgaatcagctccagcagcgccacgcgccggtgctgcataatgtcgtcatccggaaccaccgtaatatccaccagcgggaaagcggcggcataaagtcttcgcgccgtctgcgtatcagtaaactcatccagccagcaaagcgagaagggatagggacttttcgcgccgtgatagaacagcatcggcaccaccagcggcagcgttttatgcccggcatccaggtgacgctgcatcgccgccagcgcgtagcgcatcagcctgaaggccatatgcgcatccggcgtgctctggtgttcaatcaccacgtaaatatagccgtcgccgtcgcgggttttcagcgaccacagcacgtcggagtagctggcacgcaaatctgcctcaataaagctgccggactccagcctgagcgtttgcagattacacagctggcgtagcgaagcgggcagatgaatctcgataaaatccctggcgcactcgggatgcgataaaaactgtttaaataccgcatcgtgcggcgtcgagggggttcctttttgcgtcatgatccgccatccctgaaacgtaatggctggaatatatccgtcccaaaaagcgcaaacacctgcgcatcaacggctttgcttgccggtacgaaagataaatttcagcggctgaaacagactcattcttatggaaaccagcgcgcaaaatgttgattcaggaatgcgtctatagttagaggaaccctttaataaaaataaggatatccgtgatgaagagaatgagttttgcgctttcgctggcagccagcctgatgttctccagcgtggcgacagccgcaccgctctccggactgaagtttgaacagcaaaagcagcagatagtgaaagatgtgaggaaaaattgccctgccagcagcgcgctggatgatacgcagtttgctaaccgcgtgctggaatcagcggaaaataagaccgccgtacaaagcgcgacgcgggcgctggataaaaacaacagcgccgcttatcagaaggccattagcggcattcagtgccctacgccctagtaccgggcgcggagacgtcaccattagcggttcggaatgatcaaatctccgcgcagcgggctgctggcgagcatttgcgtcttctcggtcagccagttgactatctggctggccatcgcgtccatggaatattcaatcgccggaatcgtcggaataccgggcagctgtaacgagcccgccaggctgaacaccatgactttttccggtaccgcgcgattaaacgcctggagctgcggcaccaccagctgcgcctgctgctcgttggcaaccaataacgcattaaaattcagggtggttgcgttgttcaccagttcctgaaccgccacggacggcgaatggctgtcgagaaaaaccaggttgcgattgaacggcagaaaattcttttccagcgcgtgcttatagcccagcagaacctggtcagcaaatccgctggcctgaggatgaatcagcgcaatctgccgccgcccctggcttatcagatagttgcaggccgtttccgccgcaaaggcgtggtcaaactgaatgctattcgttgcgtcgctttccaggcagtcaatcagcactacgtcgggccggtcgatattgagcggaaaccgcgcgccgatgattaacacattatcgcagaggccgcaggtcaactcttccagcgaatggagcactctgccgcggctgttggcaaaacgcagcagcaggtgcatctggtgctggctgagctgtttttccagcgcgtagagatagctggtggtttgattaatgttgtcctgggcgcaaatgacgccgatgcagccggtggtctgactcagcaaagattgcgcgatcatattcggccggtagttaagcgcttccgccgcctgcaataccgcctgtcggctggcttcctttacgccgcgcgaaccactcaacacccgagagactgtggctttagataccccagctaaccgtgatacatcgttgattgtagacattattttcccctgacagggccagtccgatccctgtaaatccttgaacctgaatcgcttcaataataaccagcggcagtatatccgtttccctttttatttggaaaccgattttccgtttcatggaaaatcgtagcaaaaactaggaaaatttgtgagccaaatctaattaacacgccctttgactgacagatcttgacggttatcacagttctgttttttataaatggaaaccggtttccgtctgatatcaaatcatccacgcaataactttttacattttgaggacaatcgtcgatgtacaagattatgctgtgctgctctgccggaatgtccaccagcctgttggtcagaaagatggttgatgccgcgaaggaacgtaacctgccggtgcagattgacgcctacggagtttccgaatttgacatgcagtttccgcaataccaggtggtgcttcttgggccacaggtgaaatacatgctgaaaaacttagctgagaaagccgctcccctgaatattccggtccagccgattaacgccatggattacggaatgcagcggggagacaacgtcctggattatgccctgtcgctgattgaagcgcattaagaggtgtgcaaatgagttctctgtatcagtccatgattgccgcgatcgagcaatcaattaccccgctggcaggacgccttgggcagcagaaatacgttatcgcgattcgcgatggtttcactgccgcattgccgtttatgatcatcggctcattcatgctggtatttatctttccgcctttttccccggataccactaacggtttcgcccgcggctggctggacttctcccagcagtatcgcgaacagctgatgctgccgtttaacctcagcatgggcgtgatgacgttctttatttcggtggggatcggcgccagcctgggacgccagttccagctcgacccggtgatgtccggtctgctggcgtttatggctttcttactggttgccgcgccgtacgccgatggcaaaatctccacccagtacctctctggtcagggtatttttaccgccttgatcaccgccatctattccacccgcgtttacgcctggctaaagcagaacaacattacgattcgcctgccgaaagaagtgccgaccggcgttgcgcgttcgtttgaaatccttatcccggtgctggtggtgatcgcgaccctgcatccgctgaatctgtttatcgaagcgcagaccggtatgatcctgccgcaggcgattatgcatctgctggagcctctggtttccgcctctgactccctgccggcgattctgctttccgtcctgatgtgccagatcttctggttcgccgggatccacggctcgctgatcgtgaccggcattatgaaccccttctggatggccaacctgtcggcgaaccaggcagcgctggcggccggtgcggctctgccgcatgtctatctgcagggtttctgggaccactacctgctgattggcggcgtcggctccacgcttccgctggcgttcctgctgctgcgtagccgcgtcacccacctgcgcaccattggcaaaatgggtatcgtaccgagcttctttaatatcaatgaaccgattctgttcggcgcgccgattatcatgaacccgatgatgtttatcccgttcgtctttgtgccgatgattaacgccgttctggcttacggggcgacgcgcctcggctggctcagccaggtcgtttcgctgacgccgtggacgacgccggcgcctatcggcgcatcatgggctgcaaactggacgctaagcccggtggtgatgtgtttaatttgcatggtgatgtcggcggtaatctacctgcccttcctgcgcgcctatgaacgctcgttaatgaaaactgaagttgaaaaagcaaaagccgcagtgccggttgccgaaacggtcagccaataattaatctctatatttaatattatatttaaaatgacggcataaataatgcggaaaagggactttcactgcattatttaaagaataaagttaatgacctcaggatctatcatgattgaattagaagatgcggtaatggaaattatcgttaatgcgggccagtcacgctcattatgttttgaagcgctccattgcgcccgcaacggtaatatagatgaagcgcgcttgcttctgaatgaagccgatggctatgcccgccgggcgcaccagatgcagacccggcttatcgagcaggacgctggcgaagcgcgccagccgatgacgttaattatggtccatgctcaggatcacttaatgaattcactgctcgcccgtgaattttcggaagagttaattcatttataccagcgttaatttatatcaatatttagcaactgtacccgaactaaatataccagcttatcctggcgggatagctattatctaaatatatccgtcatatttcaagctgcatgtacgttggctgcgctcgcttacccgaatcacttaccaaagtaagctcatcgggattcactcccttgccgccttcctgcaactcgaactatttaggatatatataaattattaaaagcgagataatgatgaaaactgtaaaaatgctgccattaaccatggcggtcgtcgccgcgctgtgcccaatttccgtattcgcacaagaatttactcaggaacagatcgacgccattgtggcgaaagccgtcgataaagccctggccgaacgccaggcgaaaatcgacgccgcggctgataaaaaagtggatgttatcaccaacccgcagaccaccgcggccacgccggatatggcgatccccttcggcctgaagttcagcggctacgcccgctacggcgcgcagttccagaccggcgatcagaagtttgtcggcgtggatggctcctataacggcgcttcggcgatcggccgtttaggcaacgaaggcaacggcggcgaattccagataactaaagccttcaagagcagtaaaggcgcgatctgggatatcaacgtcatgtttgaccactggagcgatgaagttaacctgaaaaaagcctacgtcggcgtcaccaacgtgctggagtctaaccccaacgcctatatctgggccggccgcgacttccatcagcgcccgcagcaggggatcaacgactacttctggatgaaccacgacggccagggcgccggggtgaagaactttgatatcggcggcgtgcagtttgacgtggcgggagtgtcgcaggtggagtcctgtagcccggaagtgatggcggacgaggccaacccgtcgcgcatcacctgtaccggcggctccggtaccgggcgataacggccactacgccctgaccaccaaaacccacaacatcaaggccgggccgatcgacgttgaggtgtacgccaactacggtttcgattcgaaagcggtggacagcgacgaacgtctcgacgcctggcagggcgggctggtgctgagccacaccaacgacagcggcgtcaataaagtgatcctgcgctactccgataactcggataacagcgtctacaacaaaaccgatgacctgaccgcgatttacgccagctttgaagggctgcataaatttacccggcaggcgcagatcgaatatctgctggccttccacgactatgacaacggcaaggacaacaccgataaccgtaaaaactacggcgccattgtccgtccgatgtacttctggaacgatgtgcactccacctggctggaagcgggctaccagcgcgtcgattacgaccagggcggcgataaccacggctggaagctgacgctgtcgcagaacatcgccatcggtatggggccggagttccgcccgatgctgcgcttctacgtgaccggcggccaggtggataacaagcgcaccgcgaaggttaacggcaccaaagacgagcagctggattcgttaaaccttggcggtatgtttgaggcgtggttctaagagagtgaaatcgccccgggtcgcggtgtcagagcccgatccgggctatcagatcgtaacctgtagcccggctaagcgcagcgcgagccgggaagaagccgcatcgatatattcatcccggcgcattccccgggttgcggcgtaacgccttaccccggctaccactggcttaggtggtttgcaaaaggagccggagatcacctctggctcatccggcgagcgatgcgttcaagcttaatcatcagcagcagcgtgacgcccaccagcacgatggtcagcgccgaaccatcggcaatattgccgcgatcggtcaggctgaaaatcgtcaccggcagcgttgtccagcccggcgggtaaatcatcaccgtcgcgcccagctcccccatcgacagcgacaggcttaacgccagtgctgaaatcatccacggcgtcatcagcggcagcgtaacgtagcgcaggcgataccacggcgatgccccgaggctggaggcgacgttttcaatatcggcggaaatccgcgccagaccggtggaaacgttgctgaaggtaaacgcggaaatcagcacgaagtgcgccgccagaacgatccaaaaggtgccgttcatctgcagcggtccctggctgaaggccaccagaatgccaagacccacagaaacggatgggatggcgcttggcagatagaacatcagcccaaggtatttttgcagcttcgcaccgtactgccgcagggacagcgcagcccacatgccgcacagcagagcgaacaggctggcgcaaaacccgaccatcaggctggaaaagagcgcatcccacgcggcgccgcgaaacgcgttaacaaagtgtccgaaggtaaagccggacggcagcaggccgttccactgctggctcaggctggacatcaaaatcaccgccagcggcaggaagaaaaacccggcaaacagcgtcaccgccagcgctcccgccgccgtacggcctttacgcgaccaaatcaacatcgttagctcctcacgccggtacgcgcggcggccagccgatagagcataaacagccccagcgacagcagaatattaatcagcgcaatcatgcaggcgacgctgtagtccgactcgagaatagccttgctgtagaccatcatcggtagagtatttacccctttggcgccgataaacagcacgatgccgaactcgttggtggtcaacagcagacacaggctgccgcccgccattagcgccggcagcaccgccggaaaaatcacctggccgatgacccgcagcggatgcgcgccgaggatgctcgccgcttcaagctggcttttatcaatctgccgcagcccggccatcagcgggcgcatcaccagaggggtgaagacggtcatttccgccagtatgaccccctgaatcgaatagagaaaatccaccggcggcagttcaaaagcaaacagcgacatcagcgttccgttcagcagaccggcggagccgtaaataaaggtgaaagccagggtgatgagaaaggtcggcagcgcaataaaggtatcaattatccggctaatcagctggctaccgggaaacgggataaacaccagaatcagcgccagcacgctgccgagcagcagacagcctgatgtcgcgataaccgcgatttgcaaggtattgagcaatgcgctgagaaagcgccgggactccaccacctgccagaaggtttcgaggcccagatgaccctcggtatcgcgcagcgcctgttcgccgatgagcagcagcgggtagaaaaacagggtcgccagcaccagcagcggcggcagcagccacagtaagggccgcagatgaacagagcgacgcgggagcgttaagatctgcgacattatgacacctcaatcaggaccgcatcgttgggttcaaaatagagcgccagcctgtcgcccgcacgcggcagcggattcacgtgggtcatcacgatacgcaccgcctcccccgccacgtcgcatagcagatgggtcaaatcgccctgccagtgcacggaggtcaggatggcgttcagccggttgctggtggccgatcgcggcgcgagactcatatgctgcgggcgaatacacagcagcttattgttgccatgctggccgccgcggctgaacgcggcgatcaatccgccgccgcagctgacgctgaccaggccaggtcccgcggtatctgtcagcgccgtcgcctgcaggatattggcacgtccgagaaactcggcgctaaaacgattaggcggatagtggtaaagctgatgggtttcgccgtgggcaatgagcgagccgtctttcatgatgccaatcttgtccgccagggtcagggcttcggtctgatcgtgggtgacgtagagaatggtcagctccggcagttcacggtgcagacgggcaatttcctccaccatgttgtgacggatttgcgcatccagcgccgagagcggctcatcaagcagcaatacccgcggacgcacggcgatggcgcgggcaatcgcgactcgctgctgctggccgccggaaagctggtgcggatagcggctggcgtaatccgccatgccgacgattttcagggcttcctgaacccgttcagcgatctgcgctttgggctgcttctgcgcccgcaggccgaaggcgacgttatcttctaccttcatgtgcggaaacagggcgtagttttgaaccaccataccaaggccgcgttgatacggcggcaggtgggtaatatccgtgtcgccaagcaaaattcgaccaccggcaggctgcacaaaaccggctatcgcccgcagcaccgtggttttcccggatcccgaagggccgatcagcgccagcacctcaccgggctcaatggttaatgtcagcggcttcagcaccacgttgccgtgataagaaacgcgcagcgcgtcgagagtaattccggacgtccccgccagcgacggggttggggcaacggtcgttttcattaacatcacgcttactcgctgtccgtcactttatgccagcgggcaatatccgccgacagcgaaaccgcaacgtcgtcccagttgggttcccagcttttcacgccgttaagcgccgctttcgccgctttaaagttagcgtcttccggcgtcacgtcgctgcgcaccggcagaccccaggagagcgcgctgacgctggactgagcggatttatcgagcaggaagttaatcagctttttaccgttttcgccgttcggaccgttctgcaccaggccgatggtatagggcagcgccagcgcgctgcgttcgccttgcgcgtccgctggccagaagatttgcacattcgggttacgcgccatctgcgacaggttcatttgcagatcgccgttagcgatgtacagctcgcctttattgaccagcgcggtcaacttaccggtggaagcagacggaccaacgttattggcctggagcttaccgagataatcgaaccccgcctctttgctccccatgctgtgaaacgcctgtagcatgaccgccgtaccgtcacccgcctgccccggcgtcgagtactgcagtttgttcctgaagcggctatcgagcaaatcctgccagctggccggcgcggttttcagcagcttactgttatagataaaggtcagatagttattcaccagcggcgagtagcggtcgtgtacgcccgggatccgggcgctgtcctgcggctgaaattcggccaacagctgttctttcgcggcacgctggataaacggcggcaccgtcaccagcacatcggcctgagggttggtgcgctcttttgccaggcgttcaacaatcgccccggaaccgccttccacgtactgcaccttgatgcccgttgctttggtgaaagcggcgaactggtgctggtaccagctgttatcaccatcgtgcaggccgtcagcggagtaaaccgtgacgatgccatctgcccataccggagagctggtcagcgcgaacagggacagcagggcaagtcgggagagtttcatcgtatatgcctcatcgggtagttagtcattctggtatagaccagattgtttttcacgctaccgggggtttatgacaaaacgatgaatgaagtgtggcgaaaggatgacgccggagcagaagacccccctcccggaggcggcgcttgacgcgcctgtccgggctacccgtccgcaaacggcggtaaacccgtagcccgggtaaggcgccagccgcaacccgggaaaacgctcgggctggaccaataaaatcaatgggtatcgacttcaatacgcaggctgtcgtggcgccagtactcaatatcgtaatcgagaattcgcccgtgctgatcgtagttgaggcggcgcaagagcagcgccggacgcccttccatcacccccagggcgtcggcggcctggggcggcatcgaggtgggccagaacgacagatgcatactggtatatatcaggtcatagcgggtctgataaatctcggtcaggctgccgtttaaatcgtggcgcagcagctccggaaccctggcgggcagacagtggttttcacagtagcaaatcgcccgcccgtcggcataacgcagacgggtgagcaggtaaacctgatcgaatggctgcagcgccagcggcgccataacgtccagcggaacggtgaccagacgcccgtcgagcagtaccgttttcggctcccgcccctgttccaggcacagcttgtggaagttggtattctgcgtcggatccaaccacaagcgctccggcgtaacaaaccagccgcggcggtcggcgcgataaatcacgccgctggactcaagctgcgccaggctctcacgcaccgtaatacgcgtggtgttgaacagcgcgcacagctcgcgctcggacggcagcttatcgccgctcttcaacgcgccgttttgaatacgcgcctgaagctgcgccttgatcagcagatactgtggcgtctcgccagagggtgatttcatgttcgctcgcggccaaatttgatgcgctcattatacataaccagatgaattttttgttgcagcgctactttccctttgaccttttcggggcacgatcgccattataaaaaacatctggtatagaccaaatggtgaaaacaatgacttcgcgtaattatctgctgctgacgcccggaccgctaaccacttcccgtacggtaaaagaggcgatgctgttcgatagctgtacctgggacgacgactacaatctcggcgtcgttcaggtcattcgccaacggctggtggaactggcgacgcccgctaacggctacacctcagtgctgctgcaaggcagcggcagctacgcggttgaagcggtactcggtagcgcgatcggcgcgcaggggaaagtgctgattatcagcaacggcgcctacggcgcgcgcatgatcgagatggcgaaactgatgtgcattgcgcaccatccctacgactgcggcgaagtggcgcggccggacgcggcggcgatcgaacggatcctgcaaaccgacccggcgatcacccatatcgccatggtgcatagcgaaaccacgaccggcatgctcaacccgatcgaagaggtcgccgcgctggcgaaacggtacgacaaacgctacatcgtcgatgccatgagcagcttcggcggcattcccatggacgtcgccgccctgaatatcgattatctgatcagctccgccaacaaatgcattcagggtgtgccgggctttgccttcgtcattgcccgggaggcggaactggcaaactgccagggccgctcgcgctcgctgtcgctggatctgtacgcccagtggcgctgcatggaggataaccacggcaagtggcgcttcacctcaccgacccataccgtgctggcttttgcccaggcgctgaaggagctggcggaggaaggcggcgtgcgcgcacgtcatcagcgttacagcacgaaccagcagcgtctggtggcgggaatgcgtgcgctaggctttcagccgctgctcgacgatagcctgcactcgccgatcatcaccgcgttttactccccggatgcgccgcagtatcgctttaaggatttctatcagcggcttaaagagcagggtttcgtgatctatccgggcaaggtgtcgcaaagcgactgcttccgtatcggcaacatcggcgaagtgtacgacgccgacatcaccgccctgctggcggccatcaaaaacgccatgtactggcaatgctaaggaaccgtcatgaaccgtattaacgccgttattcttgattgggcaggcaccaccgtcgactttggctccttcgcgccgacgcagattttcgttgaggccttccgtcaggcttttgccgtggagattacgcccgaagaagccagggtgccgatgggtctcggcaaatggcagcatattgaagcgctggggaaactgcccgccgtggacgcccgctggcaagcgaagtttggccgggcgatgaacgctgccgatatcgacgcgttctatgctgcttttatgccgctgcagattgccaaagttgtcgatttttctgcgccgatcgccggggttgtcgacaccattgccgcgctgcgcgccgaaggcataaaaattggctcctgttccggctatccgcgtccggtgatggaaaagctggcgccggccgccgccgcgcagggctatgcgcctgaccactgggtggcgacggacgacctcgccgtcgggggacggccaggcccgtggatggcgttacagaacgtcattgtcctcggcatcgactcggtagcccactgcgtcaaggttgatgattccgctcccggcattaccgaaggattaaacgccgggatgtggagcgtgggtctggcggtttccggtaacgaattcggcgccagctgggaggaatatcagcagatgagcgccgaagagatcgccgcccgccgcgagcacgctgccgggaagctgtacgccgccggtgcgcactatgtggtggatacgctggcggatttgccgggcgtgattgccgacatcaaccgtcgtctggcgcagggcgaacgcccgtagttttattgacgattcgcctgactgcggccccattacactcgtactttcgtcgccaccagcaggccggtcagcagcatcaacgtaccggagaggaccagcggcgagagcagaccaaggtgatccagcgccacgccgccaaccgcggcgccgcaggtgttggccagctggatcaccgccacctgaatcgacccggctttctccgcctgatcggacagggagcgggtgatccacgttgaccagccaaccggtatcaacgcgaaggcaaagccccagataacggcaaccgtcgacgccacgattttactctccccccacagtaccagcaccgccgcgctgatggccagcaccaccggggcaaccgccagcgccgctttcaccgaacgtttgagcagcatcgaagagagcgaggtgccgacgaagctggcgatgccgaagctcaacagcaccagcgtcaggccgtcaacgtcaaagcctgccagcgtcatatacaccgggcgaatataggtaaagaaggcgaactggccggcgaaggccataaaaatggcacacatcccggccatcacgccggggcgctttagcaggccgaacatattttgctgcgccgaggtcgactcgcccggcagagacggcagcgccttcagcacccaaatcgtacagaccacccccatcaccgcggcgccgttaaagacgttacgccagccgataatcccaccgaggaagctgcccagcggcgcggcgatcaccagcgctattgataccgcgccaaaaataaccgacagggctttgggcaccacgcgcatcggcaccagccgcatggtgagcgacgccgacatcgcccaaaagccgcccagcgccagcccgaggcaggcgcggccgagcagcaataacgcaaagctgttggcaaaagagaccagcaggcaggaaagggtcagcagaaccgaaaacagaatcaccacgtagcggcgatcggtactgcggatgatcgaggtgataaacaggctggcgaacatcgccacgaacgccgtggtggtgaccgactgtccggcaaccccttcggagatgcctaaatcctgcgccatcggcgtgagcaggcttaccggcaggaactcaacggtaatcaggcaggcgacgcagaaggccaccgcaaaaaccgccgaccagttgggtcgcgccgcctgatgagcctgtggcgtagaggcattcgaaggagtcataagttacctgcatggttgaacacggggaagccgcgcagtgtaacattttaaatgtgacgaatttaacgttttgacaactttctcaccagcatcgccaacggacacaaggttcgcaggattaaagatggaatgcgattcgcttaccggttggcagcttaacatcaatactgagttcccccccgagcgctgcaacatagcgcttcagcgttgacaaacgcgggtcgttatcagcctgttccatttttgctatggtgggttgtttaacgcccattgccttagccagctctgcctgagacatattgagttcttcccttaacatacttaaagcgatagcctggcgcatctcctcgactttttcagcaatacgcgcctggctttccgggctctgtttggccattaattctttaagggtcgccatattttttccttactgattaaggtgcttacggtactcagcatctgcaagcttgatcatatctttatagaatctcttttcatttaaccctgttttatctccggcgcataacacgatgccacaacgagaagggtcaaatacaaagaaagctcggatgggtctaccttgatgctgaatgcgcagctctttcatattcgaaaaggcagaatcgtttactgtatccgcaaacggccttcccaaccgggggccatactcggataagatcaccattgcggcgagcatatcctctttgagcgcttcggtctgcgcctcaaaccacttgtcaaaaacctccgttgtttcaacatcccacatcagcgatccctcatagccaataagctataagtaaattatagcctactagctataaaagcaacccctctttataaaatgacttacgcattggctaatctgctgtcacgtgccgccgtcgccagcccagcccgctaatgaggatttcattggaaggacggccagatgatggccctttgttacgatgacttatgcaccggtggcctcatcggcgtgacgtttaacgaagccaacagtgcaccgggaagtgatatcagtgcagccagtggacgccatcctccggcaaaaacagcgcgttatagcgctcctgcaaagcgtgcaggtcgctcacttccggctccagctcgcgaagaaaaccttgtgccaggcggatttgcgcttcggtaatcggcgccgcgaggcgggactttttcatcaaccgataccagtagtgcaggttctgctcgctgccgtcgacgatagcgacctgccagatcagcagcacctgcgcagcattttgcaaatgcgcttcattcggccgctccaggtagcgcagatactcgttgccggcggtttttcccagctgatcgatcatcgattccagcggtaccggcgtaatgcctaaccgttcgctcagacggcgaatcgcacggcgtgaatcagaggtaagtacccgaaatcccacaacaaataccactatcagcgtggccagtcctaaccagatcatgcatcctctcattcaatacccgtcatacttcaagctgcagatgcgttggctacggattactcggcccatccatgggcctcgccctgacgggccgccgttacaggacgttcaaatctgctcccggcagatttgtcgttcacctcagtcacatagttatctatgctcctgaggattaatgagaggctcctgcctctcaccggaggccagccttcggctggtcaaattcgttcccgacgaatttgtcgctcccttgccgcctttctgcaacatgaattatttagggtatcccgcagccccactatcataatgggaaattgcccgctgtcgactgtcggtggtaccagaatgtgacttatcgcgaccccgtctcgctatcatcaaaccgcccggcaagaggtataaaaaagcccggcgcaggggccaggcaacgtgactcacacccaatgactcaggcagtctgcaaagtttgcgtctttttctgacggcggattttacgttcttcaaacaccgcaacgatggccatcaggcagatgcagccaatcgccgccgcatccagcgccgcaaaggtgcccgcccagccggtgagaccgaaaatcggcgtaccgtcggcaatcatcccgaggcccagcttggcgaagctgtcgccgatcagataggcgaaggtgcccttgatcccgtcggcagcgccaatcgcctttttcggcacgaaacctaccgcggcaacgccgatcagcagctgcgggccaaacaccaggaagcccagcgcaaacagcgaggcgagataaacgtactggttgctggcgtgctgataaacccccagggtggcgataatcagcgccagcgcaatgcaggccaccagcgcgcgacgaccgtttgccagatccgacagccagccccacagcagcgtgccgaccagcgcgcccacttcaaacagggtaaagccctgaatcgccacctctttggagagcttcagctcctggaaagcgtaaacggtggaccactggtcgataccgatgcgcaccacgtacaggaagatattggagaagcacagcagccagatgactttgttcttcagtacgtactcgacgaagatctgccatttggtcatggcgttctcttccgtctctttatcctcttcgctgatctcttcgccaaacagctcttcggcgttaccgaggccgtaggattccggggagtcgctgccgaagcgcaggccgataaaaccgacgatcagcgcgataatcgacgggaagataaacatcccgatcacgtggccgtcgaacaggtagttggcgccaaacagcgctacgcccgccgcgccggcgccgccgaggttgtgagagatattccagaagccgaggaaggtgccgcgtttacggcggggcgtccacttggtaatagtcgaatagctgcatgagccgccggtgctctggaaaaagccgctcagggcgtagaagacgatcatcaggaacaggctggtcgaccctgcgcccatgctggcgctgaagccaagcatacagatggccgaaaggatcagcataaacggcagaaactgcttagtgttcttaccgtctgcgtagtaagaaaccagcgttttaccgacgccgtaggtgattgagaatccgagaccgatcatccccagctgcgtcatgctcagcccgtaggtggagatcatgtcgttctgcgcgatgttaaagtttttgcggatcaggtacatggtcagatagccgatgaaaaccaccagatacgactgcatgaacggtttgaaccacattttgcgccgcgcttcgagcggcaggtccagggttggcttacgcacctggtttaagaaggccagcatgattgggtgactcctgagctgatttagtacctgcgaatggcaggcattgtaaaaatcagccgggagactcgcctgagacagcgtccaggcgaaaccgggaaaatttcttagttttacgccattcggcgaagaaaggtgaagtgggtcacgcttctcgcggcgcctgggcgtttaaaaacggcagcagcagcagggcggaaatgccggcggcaatggcgataaccacgaaaaagccgctccagtgccagatttccatcacctgcgccagcggccagccggagagcgatgcgccaagataggcaaacaggccaacaaagccggttgccgcccccgccgcctctttgtgcgagcactccgccgccgccatgccgatcagcatctgtgggccaaaaacgaaaaagccggtcgtgaagaagcaggccgcctgcatcacgtagctggcgaacggcatcagccagaggccgcccaccgacagcaaaataccggcggcgaaaatcaggttcatcggcccgcggttgccgttaaacagtttatccgagccccagcccgccaccagcgcgccgataaagccgcccacctcgaacatggtgaccgccgaattcgccgtgaccagatcgacgccgagcgtttccgacatatacaggttgccccagtcgttaatcgccgcgcgcaccacgtacaccagcacgtagcacagcgagagcagccagatatagggattcagcagcacgtatttggtgaggatctctttacgggtcaggccagcgccctcctgctgctgggcaatctccagctcatcgtgccgccagtcgcccacggcgggcaggccgaccgcctgcggccggtcgcgcagccgccagcagagaaacagtccggcgaggatcgccagcatgccggcaatcatcatccccgttcgccaaccgtagtgcagcgccgccgcgccaaccaccatcgggatcagcgccccgccgacgttatgcgccgtattccacagcgcccaccagccgccgcgttcggtgcgcgaataccaggtcgtcagcagacgggcgcacaccggcgagccccagccctggaagaaggcgttcagcgcccacagcagcgcgaaggcccacagcgaagtggaaaagccaaacagaatattcaccacgccggtagcgaccagaccgatgcccataaaatagcgggcgttagagcggtcgctgacgataccggagaaaaatttcgacagcccgtaggtgatgtagaacagcgttgccagcaggccgatatcgctgcgcgtcagcacgttgctggcgaggatttccggcacggcggcgttaaagcttttacgcgtaaaataaaacagcgcatagcccagccagatggtcagcagaatatgccgacgccagtagcggtagcgcgcgtccagcgccggtttgtcggtaatcggcggagcagcgggcggggatttcaaaaaggcaaacatcgtcgctcctcaggcgtagcgcagcggcaggctgacgcaaacgcgggtgccgtgggtgcaggagatggttaaggtgccgcccagcgcgctgacgcgctcgcgcatgccggtcaggccgaagccctgctgacctgagcccggcggcaggccgcagccgtcgtcctccagcaccagcatcagccgctgctcctgctgccagccctgcagcgtgacggcgctggcgctggcgtgtttgacgatattattcagcccttcctggcagacgcggaacagggtgacgcgctggttttcgctcagcagcgactcatcaatgcgccacgccagatggctgaccataccgcggtcctccagctccatttcgcgcatcaacgaacgcaccgcctgttcaagcgtcaggtcgtccagctggcgcgggcgcaggcggcccagcaggcggcgcaccgaatcatagacgccgagcgaaagctgctcaatcagctggccgctctgcctgacgctggcgctgttaggcgccagacgctggacgatccccgcctgagtacggatggcggtgatggtctgcccgatatcatcgtgcagctcgcgggccacctcgcggcgcacgctctcttcggtttccagcaggcgttccgccagccgctggttacgcaccagctcgttttgcagcgactgattcagctcgcgcagccgctgaatgcctgcgcccagcagcaggcccgtcaggctttgcgccagcagcgaaagcagcaaatccaccggatgatcgtgccagctctggctggcaatcagcgcgatggcgttcatcagggtcgcgatcagcgcgccctgccagccgtagtgccaggccagggcgataatcggcagcgccaggcagaaaggcgtaaatcgcgagagctcggcgggcagccccagctggagccagagactgacgctgaacagcagcaggtaccagataagatgccgcccgcgccagtttaccggctgcgagaccagcgatggccccagcggccgccagacggtactggtaaggtagtgccagataaccaggcaggtaggcgccagcgtcaggccgccggtcagggtcagcagcagcgcgttcagcccctccttgccttccggcagccacggcagcgactggagcagcgcagcggcgatcagcgcccctccctgacgcagcagggtgagccagtcacgctgctggcgatagcgtgagatcagcgccaccggcagcagggtcaacagacttccggtcatcaatattatcgggtgcgccagcgccacttcctgcgccagccagaagatcagcagccactcagcgcccagcagaaccggccagtagccgcgcggacactgcagcatcaggccaagacgcaggccaaaggggaaaagcagcaccgcaagatcggcacgctccaccaggtgcaggctgatgctccacaggcaaaaccatgcggcggaaaagataaagcaacagccaataaccgagagcagccgggagagaaaggcgttcattgccagctatcgaacatgcggcgcgccagctcgacgtcgttgctgacgcccagcttttccagcagattggcgcgatgaacgtgcacggtttttggcgacaggcccagctcggcggcaatctcttttaccgccatcccctgcgccagcttttccgccacctcgcgttcgcgtttggtgagcgggtcccgtcgcccggccgccagcttcatggcgatatccggcgtcaggtagcagccgccagccgccacggtgcggacggcggcgatcagctcatccgggctgcagcgcttggagagaaagccgcgcgcgccggcgttcagcgcctgctccaccagcgccgggctgtcgtgcaccgacagcatcacgatcgccatccctttaggcaactggcttaacagctcaagcccggagatatccggcatcgagatatcgcagatacagacctgcacgccgcggccgggcagccccgccagcgcttcgcgaccggaaccgaattcggcgacgacctgaaaatcggcttccagccccagcagctgggcaaagccggagcggacgataagatgatcgtcaataagggcgattgtggtcatggcgattcctggggaggataaaaaacgcgcttaccttaacggtataaacgtcatccttcaagctgcctctgttccccccagtcactgacttcagtcagctccagggggattctcagagttgccgccctgatgcggcttgagtgattttgtttatcgcgcgcagcggatcaagccgcgagcgattattcgaagaacaccgcgattttgctgaacatggagggatcggactgattgcgcaccaccttctcaacgtcttccagcttttcgatctggctaatcatctgcccgaggcgctgatcgtcgttgaccagtagccagatgcggctctggttgctgtccgggatcggcagacaaagaatgccttccacgttaaatgcgcggcgggcaaacaggccgcaaacgtgggtcatcacgccagggtggttgcgcacggtgagctgtagaataacgttttcatgagtcgcttgttgcatggcttattcccccaccatttcagtattggccgcacccggcggtaccatcggatacactttttcttcggcatcgatacgcacgtggatcagcgccggacccgggcggtcgataatcgcctgcagcgccgcctgcggatcggcttcgttatttaaatcacaggtttgcagaccaaaaccggcggcgatctgcataaagttgaccatgccaggataggtcgcggcgaacacgccctgcttgtagaacaggctctgctgctggtgaaccagccccagcgcttcgttattcatcaggataattttcacgtccagctgattttccgccgcggtagccatttcctgaatgttcatcatcaggctgccgtcgccggagaaacagatgaccttgcgctgcgggttagccagcgccgcgcctactgcggcaggcagaccaaagcccatggtgccgaggccgccggaggtcagccactggcgcgggcggttgagcggatacgcctgcgcgacccacatctggtgctggccgacgtcggtggtcacgattgcctcatcgtcaacgcaggcggcaacggcgttaatcaggccatagtgggtaagcgggtcttgctcctgcggaatggtgcaggggaactcccgctgcagatcggccaccagctgcagccattcgctgcgcggctgcgcctcgacctgcgggatcagctgcgccagcacttcgccaacatcgccctgaatcgccacgtgcggctgtttgattttgcccagctcagagcggtcgatatcaacgtggataattttcgcgttcgggcagaactgctcggttttaccaatcgcccggtcatcaaaacgcgcgcctaaaacaactaataaatcagcctcttgcaaaataaaattggtgctgcgcgcgccgtgcatccccagcatgcccagcgacagcggatgcgctttcggcagcatccccagcgccatcagggtctgggtggttggcaggttggctttttccgccagctggcgaatgggctcaggcgcgttgatcaccccaccgcccagatagagcaccggacgctgcgcggcgttaatcatcgccgccgcttcacgcacgctggcgctatcgaacgtcggaggcgccgtacgggcgccgggttccggcagggcgtcaagctcaatggtcgcggcctgaacatccttaggaatatctatccacaccggccctggtcgcccggactgcgcgatgcgaaacgcgtcgcttatcacctgcggcagctcagcaatgttgcgtaccagatagttatgtttcgtgatggggatagagataccgtaggtgtcgacttcctggaaagcgtcggtgccgatcattgaggccggaacctggccggtaatgcacaccagcggaatcgaatccagacgggcgtcagcgatagcggtgatcaggttagtggctcccgggccgctacaggccatacacaccgccggtttgccctcggtgcgcgccatgccctgggcgataaaccccgcgccctgctcgtgacgcgccagaatatggcggatctgcgtgctttggcttaacgcatcgtaaatgggaaggatggagccgcccggaatgccgctgaccgtagtgatcccctgacgctccagtaaatgaacgactaactgtgcgccagtgaagcgcattttttgtgatgttgtgcccgaacttgccatgctccagtccttttattctgggccgacttaccggggggcatgaaacgaaaaaccccgctcggtttgcgccggcggggtttggaattcgtgttgttccggaccctacggcgcgttgccgacgacgaccaccacagacacgacgaccaccgcggcaggcgcggttagtagtagggtcgaagtcagcgtggtagcgttcatgagggacctgttgtctcaaaaaagggaatgaatttatacaaacacagcttttgtcatttcacaatggatttattttcaaccaggagaaactgcgcggaagatcacattaatttgcggcgggataaaaacaaaaaaccccgccgcggcgaggttttctgttcggtgtttttacggttggtagccgcaagcacactgtattacgtcaacgaaaaaagtatacgcgatcggggaagaaggcgcaattttcacgatggtttttgctgatttagagtatggatcgcgtatacaaatttgtccaaaaaatactgttcatatatacagtattcattctatactgagggggtacgcagggggaatctggggccgcacttttaccggcgcaaaaaagtcctggctgaaacgggtggtgccgtcagcgccttaaccccagaagagcacactgtgttacgtcaacaaataccccgaattattgagtccgccaccggcaggtggcgcctgaatatgacgggtataccctggctggcaacaggcggcggaaaggtacgccagccggttgtgctcctgaaccagaggagacgcgtatgggcggagtggatatcgttgttctgatcctgaaactcatggttgccgtgttgcaactacttgatgcagtcctgaagcagttccgctgattcaggttcaagtcgcacctgagaggggcgggaaaccgcccctctacaggctaacctgacggagaaaaattatggcaccgttgttgatcgccgctatcaccccggacgaacctggtttttcggcactccgcgccgaaagcctggcgcaaaacctgaacatgctgcgtcgcctggcggagaactggcagaacggggaaaaccgttttaacgcgccgggagaaaagctgctgggggcttttgcgcacgggcagctggtcggcgtgtgcgggcttaacatcgacccttttagccagcagccgcgggccggtcgcatccgccatttgtatatcgccgagcgccatcgtcggcaggggatcgggcatcagctgctggtctcggttatcacccactccggcagcagctttgattttctcaacacccatgcgccgtcaacggcctggtcgttttatgaaaatctgggatttcgcccgatatatgatgaaccccgggtcacccatcgtctgttctgttcgctctagccgccgctggctgctgaagagtgcgcatgttacagtccgttgacgatttattccccagcgccaggccgcaatgaccattaccgtattctgtattttgctgttcgccgccctgcttcacgccagctggaacgctatagttaaagccagcggcgataaaatgtacgcagcggtaggcgttagcggctctgcctcgctcatcgccctggttctgctcccttttgccccccaacccacgctcgccagcgtgccgtttcttgccgtctcctgcgcgctacaggtggtgtatacggtgctggtggcaaaaacctatcaggtctcggatatgagccagacctatccgctgatgcgcgggaccgccccgctactggtggcgataatcagcgtcgcctttcttggcgacactctctccccgctggcgtggctgggcatcggcgtcatctgcctggcgattctggcgatggcctttaacgggcgcgccagttcgagccagggtatcgtactggcgctgatcaacgcctgcttcattgcgggctacacgctggtcgacggaaccggtgtgcggctttcagaaaccgcgctgggctataccctgtggaccttttttatgaacggcttctgtctgctgggctgggcgatgattgcccgacgcccgcaggccagccgctatctgcgccagcactggaagaaaggcatggtcggcggcgtcggtaccatgggctcctatggcctggcgctgtgggccatgacccaggcgccgctggcggtggtagccgccctgcgcgaaacctcgattctttttggcgcggttatcgcgtttatcctgttgaaagagaaggtagttccattgcgcatcgccgccgcctgcggcattgccgccggggcgattctgctgcggctgtcgtaatccacacatggcaacattagttgccgactttcgtttacaaaacctgcctgaacatccccgacaatccccccttacagggttgttctgtcatttttatgtggtagattcctccatcgtttagcgggtgtgccagtcacatattcttcatctccaactttatacaaagtattcatcgacatgaaacggcataagaacttcaatttgttgttgatgctggtgctgctggtggccgtaggccagatggcgcagaccatttatattccggcgattgccgatatggcgatatcgctcaacgttcgcgaaggcgcggtgcagagcgtaatggccgcttatctgctgacctacggcgtctcgcagcttttctacggcccgctctccgatcgcgttggccgccgcccggtgatcctggtgggaatgtccatttttatgctggcgacgctggttgccattaccacccatagcctgccggtgctgattgccgccagcgcaatgcaggggatgggtaccggcgtcggcggcgtgatggcgcgaaccttgccgcgcgatctgtatgaaggggcgcagctcaggcacgccaatagcctgctgaatatggggattctggttagcccgctgctggcgccgctgattggcggcattctcgataccttatggaactggcgggcctgcttcgtatttctgctggtactttgcgccggcgtcaccttcagcatggcgcgctggatgccggaaacccggcccaccggcgcgccgcgtacccggctcatcaccaactataaaacgctgttcggtaccggcgcgttcaactgctatctgctgatgctgatcggcggcctggcgggcattgccgtattcgaagcctgttccggcgtgctgatgggcgcggtactgggtctgagcagtatgtcggtcagcattctgtttattctgccgatcccggcggcgttctttggcgcctggtttgccggccggccgaacaaacgcttcccgacgctgatgtggcagtcggtgatttgctgcctgctggcgggggtgctgatgtggatccctggcctgctgggcgtgatgaccgtctggaccctgctggttcccgccgcgctgttcttttttggcgcggggatgctgtttccgctggcgaccagcggcgcgatggagcccttcccgttcctcgccggcaccgccggggcgctggtgggcgggctgcagaatatcggttccggcgtgctggcgtggctgtcggcgatgatgccgcaaaccggtcagggcagcctcggcctgctgatgatgctgatgggattgctgattctgctgtgctggctgccgctggcgtcgcgctttcatcaacaccagcagccggtttaaggcttctttgcgggttccccgggtcgcgacgcggcgcgtcttacccgggctacaaatgacggacgccgataaacccgtagcccggctaagcgcagcgcaagccgggaagcagtggcgaattatcagccccggcatatttcccggaggcggcgcctgacgcgcctgtccgggctaccggcccgcagacggaggtaaacccgtagcccggtcagcgcagcgccaacgggatgaaactaagccggtcatcataattgcgcctgactctgcagccagtggataaaggcgtcaattttcggccactgacggcccggcagggtcgtcacgtagtagtgctgatggcacttcagggtcatctcgccgaacggtgcgatcagctcgccgctctccaggcgcttttgcaccagccgcttacgccccatcgccacgccaacgtgattcatcgcggcaatcaccgctaaatccgaacgatcgaagccaatacccgacgattgcggcaaatcgacggaaaatgtctgcgcccagctgaaccactcatcggtgccggaatcgttgctccacgcctgacgatcgtgcagcagcgtacagtggcgaagattgccggggttctgctgtagctgatgctggcgcgcgtaatccgccgtgcagaccggtacgatggcctcatccatcagaaaatggtggctcagctgcgaggaaggcgcatcatcgaagtagattgccagatcgatgcccgcgcgctgcatattgacgttatcgttgccggtcagcacggtaagcgagatcgacggatagcggcgggtaaaatcgccgagcgcgggaaccagccagcactgggcgatggacgggcgcgaatagaccgttaacgtccccgacagctcctggtttttaatatccagaatttcctggttcaggctatccagcgaggacttcagcgcccagaacacccgcttaccttcatgcgtcagctctactttgcggtgcgagcgcacaaacagctggatccccagctcttcttccagctgattgatacggtggctcaccgcgctgggcgtcagcgacagctcctccgccgccagcgcaaacgactcatgccgggcggcgacttcaaaggtatacagcttcgatagctgccagccgttaagcaggcgagtgcctaactcttttagcgtctccatctcttactccttcacaattccccgccgagtgtaagaaatttttcgcgccagctgcgcattaaagatgaataaaagtgatgcatagcacacataacagacaattttagagcaaaatcacctttttgattcaatctgattcacctgaagggccgtttatatcgtttgtcagcgcgtgccgtttttctgttcaatacccatagattattcacaggcgaggtggggtatggaatctcagatctgggttgtgagcacgctgctgatcagcatcgtgttgattgtattaactatcgtcaaactgaagtttcacccgtttctggcgctactgctggcaagctttttcgtcggtgccatgatgggcatgagcccgctggatatggttaacgccattgagagcgggattggcggcacgctgggcttccttgcggcggtgattgggctgggaacgattctcggcaaaatgatggaggtctccggcgcagcggaacgtatcggcctgacgctccagcgctgccgctggctgtccgctgacgttattatggtgctggtgggcctgatttgcgggatcaccctgttcgttgaagtgggcgtggtgctgctgattccgctggcgttttccattgccaaaaagaccaacacgtcgctgctgaagctggccatcccgctgtgtacggcgctgatggcggtgcactgcgtggtgccgccgcatccggctgcgctgttcgtcgccaacaagctgggcgcggatatcggaacggtgatcgtttacggtctgctggtgggcctgctggcctcgctggtcggcggcccgctgttcctgcggctcctcggcaaccgcctgccgtttaaagcggtgccggctgagtttgccaacctcgaagtgcgcaaagaagagaccctgccgtcgctgggcgccacgctgtttacggtgctgctgccgatcggcctgatgctggtaaaaaccatcgccgaactgaatatgaccaaaggcggcacgctgtatatgctgctggagtttatcggcaatccgatcaccgccatgtttatcgccgtctttgtggcctactacgtgctgggtatccgccagaatatgggcatgagcactctgctgacgcatacggaaaactgtttcggttctatcgccaatatcctgctgattatcggcgcaggcggggcctttaacgccattctgaaaaccagcggcctggccgatacgctggcggtgattctgtcgaacctcgatatgcacccgattctgctggcctggctggtggcgctgattctgcatgccgccgtcggttccgccaccgtcgccatgatgggcgcaaccgccatcgtcgcgccgatgctgccgctctatcccggcgtgagcccggaaatcatcgctatcgccatcggctccggcgcgattggctgcactatcgtgacggattccctgttctggctggttaagcagtactgcggggcaagccttaacgaaacgttcaaatactataccacggcgacctttatcgcttcgctgcttgcactggccggtacattcctgctttctttcatcatctgagcgcaaagagacgtaatatgaaaaacgctgacatgaccactttactcgcccagtttcctctactggaggagctgatagccctgaaagaaaccacctggtttaacccgtcaacgacgtcgctggcggaggggttaccctacgttggcctgacgactgaagacgttcaggacgcccacgcccgcctcgatcgttttgcgccctatctggcggaagcctttccggaaaccgccgccaccggcggtattatcgaatccgagctggtggccatcccggcaatgaaggcccggctggaaaaaacctttcgtcagcccattgctggcgatctgctgctgaagaaagacagccacctgccgatttccggctcgattaaggcccgcggcggcatttatgaagtcctgacccacgcggaaaaactggcgatcgacgcgggattgttaaacacagccgacgactaccgcaagctgctgacccccgagttcaggacgttcttcagccagtacagcatcgccgttggctccaccggcaacctggggatgtcgattggcataatgagcgcgcgcatcggcttcaaggtgacggtccatatgtccgccgacgccagagcgtggaaaaaggccaaactgcgcagccacggcgtgacggtggtggagtacgaagaggattacggcgtggcggttgagcaggggcgtaaagccgccgagtccgacccgaactgcttctttatcgatgatgagaactcgcgcaccctgttcctcggctactccgtggccggcgagcggctaaaagcgcagtttgcccgcgaagggcgcgtggtggatgccagtcatccgctgtttgtttatctgccgtgcggcgttggcggcggccccggcggcgtggcgtttggcctgaagctggcgtttggcgataacgtccactgcttcttcgccgaaccgacccactccccttgcatgctgctgggggtgtataccggcctgcatgaccagatttcggttcaggatctgggaattgataatctgaccgccgcggacggtctggcggtaggccgcgcttccggtttcgttggcagggcaatggagcgcctgctggatgggttctactctctcgatgaccagacaatgtacgacatgctgggttggttagccgaggaagaaggtattcgcctggagccgtccgcgctggccggcatggccgggccgcagcgggtctgcgccagccaggcgtatcagcagatgcacggtttcaccgccgggcagatgcgcaatgcgacccaccttgtgtgggcaaccggcggcggcatggtgccggaagaggagatggcgcagtatctggcaaaaggacggtaaacctcccgtcaggtcaacgcgatggcgacgaagcttctttcgtcgccattttttagcgcagcagatgcataagctcaaccggcgaacgatgctgattgagtagatcgcgcagaacgcgcatatagggggcgctccagctataaaactgccggtaaccctcgcatagcgcattggagccatcctccagacgcagctgcgggcagcccccaccgcataatcttagccaggcgcagcccgcgcaggctggccccggcggattgttggcatactgcaccgactcgccgcgccaggcgcgcagcgtggcctcaaacagcggcacgacgatgcggttagcatcttctttaacccaaatcgcaaacaccgcgcagaggaaatccccccacagccgggcgtcggaaggttgcagatggggaataaacttgatggccacggctccctgagcgctcagctgatggtagacacgctcggggcgttggcacgcctgacgatcgataatgacttcctgtaccggaagatcgctcgccagcgatttgcagttcccgcagtgccgatcgtcaccgtaatcggcctgacatcctgtcatgtcatatccttaataaacaaaatcacctgtcgtatatgggttacagcaaacaacaatgacagggaaagtactgcgaatgcgatcaaaaatttgtcacgaaccgcctgcggctgagcaaaatcgctttgctcaacgttcatcagattgcggctgcgggtatagcgccagaggataagggcggcgaacggcaatatgcacagcgaaatccagaatgcgatccccgcctgatgccagtggtgcttaatcgccagcgccagcagcgcgccatagcctaaaagggtgcgaaaccaggccagcgacgtacgctccggctgcaggcccggatcgctctcgcgacgcgcccggcgattatccggcatagagcaccagcgccatcaccaccacgatgacgagggtcagcagaatactgatcagcagcagcgtgcgtgtatagggaagatcctgtttaagccgcatcgccttttcgttgctcagccagcgtatatagccgtaaatcgccagaccgccggcaaacaggcacagcagcagcgccagaatttcgcgaatcagcggcgtagcgaaatccggcgccagctggtccaggccgacgccaccggctaaaaagcctagcgaagtgcggatccacgccagaaaggtacgttcattcgccagcgagaagcggtaatccggcgcttcaccaaggcgggatattttcatcatgactccttgatggattcccggttgcgtaaaataccgccgattctacctgactgccaaagcggagggcattaataatcgccccgtttcagaggaagctcaggcctgataaccgtataaagtcgggctatcaggccgataaatgaataaccggcaccctgtggctgccggtcagcaggattaatgcagttccggccagtacgctttattggccgcaatcaggtcatcaagaatcgctttcgcaacggatgcgctcggcacggttttcgacagcgcaatggcctgccacagcttgtgataagagcgctgttcccaggcatccaccaccagtttttccaccgcaacctgctggctcatcatccctttctggaagtggggaatgtcgcctaccgtcagcggctccggtccgttgtggccaaccaggcacggaatttccaccatcgcatcggcgtcaaagttatgaatcgccccgttgtttggcacaatcagcagcatgcgttcctgagtattaaaggcaatcgccgccgccagatcgacgatgtaggacgcgtgttcgtcaatttccagatcgcctgcggaggagtggcccgcagcaataatggcccgacaggcgctaaagacgtttttctcacggtgatccatcacctcgttggcgcgggtgcgttccggattggagtgcgccacgacgtagtccgggaacagataatacttaaggtaagtatttggcatcgtatccggatccagcgcctgcacgtccttcgccttggcgaaggtgtcgttccagctcgcctcggtatggggatcgtttgatggcggaacatagccgaatttcgccacatgttcgcgcagtttcggcatcagatcgttaccctgcagatcttcaatcgaggtccaccagccgaagtggttcaacccatagtagcgcacgcgcatctgcttgcggtccttgaggccgacgatttgcgccatccgcccttcgataccgatcggcatatcgcaaatgttgagaattctggcgttcggacgcaggcgacgggtcgcttccgccacaatggccgccgggttggagtagttcagcatccaggcgttcggcgaatatttttccatatagtccaccagctccaggacgccgccgatggagcgcataccgtaggcgataccgccagggccgcaggtttcctgccccagcacgccgtggcgcagcggaattttttcatctttttcacgcatcgggtatttgcccacgcggatatgcgccatcacgaaatcaacgtcggtaaaagccgcctgcgggtcggtggtatagctgaattcaatctccggcgcctgctctttgaggatcactttgcacgcctcggcgatggtctcctgacgcgcgccgtcgttgtcgtaaaatttcagcgaccgcagcgggaagcgatcctggttcgctaacagcatcagcacgatgcccggggtgaaggtactgccgccgcctgcgataacaactgagaattttttcatgatactgcctccgtcatggtggtttgttcggtctgtagagaatctttgatgagggtttccagctggtcgcggacctgaggaacgtgcaggccgacgatgacctgaattccgttgccgcggcggactacgccgtgggcgcccagcgctttaaagacgtcgtcgctttgcgtcttcgccatatcgaccagcgcgatgcgcagtcgggtggcgcagttattaatgctttcgatattgcccgccccgcccagcgcctgcaggaagccggcggcctggcccagtttggtatccgcggcccccgcggcgctggttttgccgcgcgcggcctggtaatccgctttgctatagagcttaatttcactctcttcgcggcccggcgttttcaggttcaggcgcagaatcaacgtgcggaagatgacgaagtagagcgcggtgaagcacacgccaacgcctatctggataaacatcattgaggcatggttgtggaacatggggatccagttttgcggcaggaactggtcgagcaggccgccgccaaagttgcctaccacgccgcagatatacatcaccgtcgccatagtggccgccagcaccgcatggactgcaaacagcagcggcgagataaacaggaaggtgaactctaacggctcggttattcccaccagtacggcggtcagggtggcgggaatcagcagaccggcgactttcacgcgattttccggcgcggcggtgtagtagagcgccagcgcgatacccacggaaccaaagaccttcgagttaccgtgcagcgcgaatccgccttccgggaagagggttttcagcgcctcggtactctggctgaactcatgtaaatgctgcgcccagtaaacctgaataccgctttccactaccgccgggccgaaaataaacggtccgtagacaaagtgatgtaaaccggtcgggatcagaatgcgctcaaggaaaatatagacccagacccccagcgccccggccgagcgtaagaaggcctgcagcgattcaatgcccatctgcacttttggccagccaagcagggtcagccaggcgcaggggatcatcgccaggaaggcgacaatcaccacaaacgaggagccctggaaaatccccagaaacaccggcagcggtttatcgaagtagcggttatgcagggcggtcaccagcccggagataacaatcgcgccgataatgctggtatcgagcgttttaatcccggccatcatcgtcaggccgctgcctggcgtcggctccacggaaaaatcgacgccgaagaagtggccccaggtcattcccatggcgttgatgaagtagttccaggtgaggaagctgaccagtaccgccaggcaggcccggccctgggcctgtttcgccaggccgatcggcagaccgacggcgaaaatcagcggcatattacgaaagacggtccagccgccctcttcaacaatgtgaacgatctgagcaaataaactatcgggtgctgtgagcgcttccccgacgaacatcgggttgcgcagcataatggcgatacccaccacgatcccagcgaaaggaaagagtaaaaccggggtaaacatggcgccgccaaagcgttgtatttgactgagcatttgaaaatcctcatataacaacttatagggtgagtggccttatccatacccggcatgcttcacgtaccacggtgaatgattcagggtaattatttgtactggcctgaaacgagaatagaaatttgcccggtcgacaacatgcggcgccgttacgattcgtgatcgctttcatggttttaattgcgccaatgttgtctactttttaagtaaaaattagacattctgaattgcgcttattacgcctctgtaaccaagcgtatttatccatatgtattaactctatttttaaagctaataatccgtgcatcatcgttttcaactgagtgaatagaggtctactggtgatctacaaatccatcgccgacagattacgtttgcgcctcaactcctccgatttcgaagtcggcagcccgcttcccggggaaaaaaagctggcggaagagttcggcgtcgcgcgcatgactatccgcaaagccatcgatctgctggtcacctggggactggtggtgcgtcggcacggctccggcacctacgtcgcccgcaaagacctgcatcatgaaaccagcaatctgaccgggctggccgaggtgctgcgcaagcagggtaaagaggtggtcagccgggtattggtttttgaggtgatgcccgcccccccggctatcgccagcctgctgcggatacaaattgatgaacggatctacttctcgcgccgggtgcgctatgtcgatggcaagccgctaatgctggaggacagctatatgccggtgaagctgtttcgcaatctgtcgctggtgcatctggaagggtcgaagttcgattacatcgagaaggagtgtggcataaccattagcggcaactatgaaacgctgtcgccggtgctggcggacaggcagctggcgcagtcgatgaacgtgccggagcagacgccgctgctgcgtataacctccctgtcctacagcgacagcggcgagtttcttaactattcggtgatgttccgtaacgccagcgagtatcaggtggactaccacctgcggcgcgtccaggcggagaatccgttaacctatcccccagaacagcaccgccagtagctgcggcgtaataatacgtaagaacatgaccagcggataaacggtcgcgtaagagagcgccgccgcgccgctggtggcatgcaggttgttggcaaaggccagcgcgggcgggtcggtcattgaaccggccagcatcccgcacagggtcaggtagttcatcttcgccagcatccgcgccagaataccgacagccagcagtgggatagcggtgataaagatgccgtagacaatccagctcatgccatcaccgtcaatcagcgtcgccacaaaatcgccgccggatttcaggccaaccaccgcgaggaacagcacaatgcccagctcgcgcagcgcaaggttagcgctgggcggcataaaccagtagagcttaccgatgctgccgatacgcccgaggatcagcgccataatcagcggccccccagccaggcccagcttcagcgccgccgggaaccccggaataaacagcggaatggagcccagcagcacgcccaggccaataccgataaataccggcagcatctgcacctgctgcagtttttgctgggcgttgcccagctcggcggccaccgcgtcaatcgcctccggacggccgacgaggttaagaatatcgccgaactgcaggctggcatggctgctggcgaccagctcaaccccggcgcgattgagtcgcgagatcaccacgtcatagcgctgtttaaagtgcagatcgcgtatgcgtttacccaatactttttcgttagtgaccaccacgcgctcgactttcagatcggtaccgcgcgtggagagcgaagtggaaacctccttgccaatcaccagctgggcattgtgtaaatcctccggtcgcccgaccaggtgcagcaggtccccgagctgaatcagggtattcggcgcgggcaccattagcatctcctcgcgcttgaggcgcgagcagatcagcttgtcgctgttaagcatcggcacatcctgaatcgccatattgttcaggttggggttttcgacccgcacgttgatggtctgaagatgcgcgtggccgttgccgctgatctcgtcaaactgctgggcttctttctcgacgttgatgcggaaaaacagtcgcaccagccacatggtcagcaaaatgccgcagataccaaacggataggccatggcgtagctcatccccatctgatcgacggtatcaagcggcacgccaaggtcgcgcaggatctgctgcccggcccccagcgcaggcgtgttggttaccgcgccggagaagatgccgagcaccacgggaagagggatatcgaacagtttatgcaggaccgcggtgaccaggccgccgagaatgacgatcagaatagcgaagaggttcagccgcaggccggagacgcgcagcgaggcgaagaagcccggccccacctggataccgatggtatacacgaagagaatcaggccaaattcctgaataaagtgcagcatagggctgctgagcgtaatgcccgcctggtccacaaagtggccgacgataataccgccaaacagcacgcctccgataccgaagccgacaccgcgcacttttacattgccgatccacaatccgacgaccgccaccagcgccaatacgctaacggtcaatgctatatcactcatcgtctcttccctgtgtataacattactcacaatgaggattatgaccggtactcaccaggctgtatgccgcctggcgcacaataatcacgggatcagccaacgaccattttgttgaacacagcaagaaaggacaaagtaatgcgtatcacacacaaaaaagccccgaacatcggggctttataggtggttagcttaattagctatctaacgcggggcgctcgctgatggcgatacgctgcggggcgatctgttccggctcgttgcgggtcaaatcgatatgcagcaggccgttggtaaaggttgccccggagacttccatattttcggcgagcgtgaagctcaggctaaacgcctggttaaccagcccctggtgcagccatttggtctctttttccggctgctgcggcgcgccttttaccgtcaggcgcgtgccttcaagctggatatccaaatcttcctgacggaaaccggccagcgcaagggtaatgcgatagtggttgtcgtcgcttttttcgatgttatagggcgggaagctctggctttcaccggcggtttgtagcgcgttggccagtttgtcaaaaccgatccattgacgcagcagcggggataaatcgtagttacgcatagtctttctccttctaagaagcgagtggatatctgcaaatcctgtggattcgcctttgccccctgacggcgggcagtttttttgaatgaataccgggccgccttcgcggcccaacaaattagttgatctcgatacggcgcggcttattcgcttcaggaataactcgctcaagttcgatatacagcagaccgtttaccaggttggcgccgcgaatatgaatattttccgcaagctggaatttacgctcaaaattgcgttcagcgatgccctgatacaggtaagtgcgctctttctgctcggcggcatgggcgccttttacgataagcagattatcctgcgcggtaatttccagttcgctctcggcaaaaccggcaacggcaatcgcgatgcggtagttgttctcgtctactaactcaacgttgtacggaggatagccgccattactctggctttgattattttctaacagattgaaaaggcggtcgaaaccaatagcagaacgatacagcggggagagatcgaaattacgcataatacatagctcctgaaatcagcgagaattatctgaccttccatcatggacaggccgttattacccggaatacccattcggcgtattctccgggagacacattcctaaaatgggtatatccatgaccttttcaaggggaaatgggcaattttttttgcagtttgcggtctattgcttagactggagggacagcacaaaaggcaaagtgcgacgcctgccacagtgcggcgcaatggcactatgcatccatggaatggcccgatataaccgatatgtacgccattcttcaggccgcggctctgttggctgcgccctgcatgattttgtacatagaaggttctatcaacgcccgtaacgatgacggaaaaatgatgaaaaacggtctgttaaagctggtcctgtttagcgggatgataagtttaggcggttgctccagcgtgatgtcacataccggcggtaaggaaggaacctatccgggaacgcgcgccagcgcgcaaatgctgggagatagcgatgccaactggggtacgaaatccctggtggcgctggatatgccgctcacggccgttatggacacgctgctgctaccgtgggatatgttccgcaccgatagctcggttaaatcgcgcgtggaaaagagcgagaaagagacgctggcgaccaacgcagtgatcccgccagcgccaatgccgaacccctgatttagcgggccgttgcagttacccacagctggcggtaaccgtccacctcctccatccaggcaagctgtttgccgtctggcgaaaagacgaccgcgtcggccgaaggcggattgacatgctcatcagtcaaaaagtcgatttccccgctccgcgcatcacaaagcgcgatgcggttttccagcacaaagcccagccattttcctgacggatgccagttaaacgccgactggatatcggatcggctgttggtcagctgccgcagcttgtctccctgcgccgagataagccacatttgcaccacgccggcctcgtcgcgcatcagaaaagcgatgtccgttgccgacggattagcgcgcacccaatgacgcggcgtattcaccagtcccgggtaacggcgttggtgggtaaacgttaagcgacgctgaacaacgccggcagggggcgccggcatcgtggtttccgttcctgccaatggcgcatcgccagactgcttccagccctgctcgctctccggcagctcgacaataaatagctccggtactttgtcgccatttaccgccagcgtatcgccaataaacgccagcgcccggttgcccacccagccctcttcataggcgcgattaatctcgtcgctgcccggcgcgggggttggcgttgtgcggctgaccagcacgcaccagtggctgccgccgtattctcgtggatgatccccacgcggtactaccgggccatagggaaccgccacgccaacgttgcgcaaatccagcgccggatcgcgttcatgcagcacgtggtcgttataggtaaagctgacaaattcgccgctcgggctgaagacatgcacatggctgccgccgcgcagcgcgccgggtgtatagggggcggaaatatccatcgcatcgaggttatgcgtatctccctgccaggagaccacgccgcgacgatggtggaaatcgtaatgccagcgctcgtcagggttttccgggccgtggataaagacatatttatctatcgatggatgaacggtcaccacgccaacgtacgcgccctgtccggcacggtagaggatctcaacctctcccgtctcgacattcacccgctcgatggtttcgccggtaaaagaggcgccagagggacgaacgtcgaaaaccagccaccggctgtccgccgtccaggcgcgcgtgttggtaagctgatgatgacggggagcaaaggtgacttgtttcataaacataccctgatgcgagactttcgcatcagggtatcgtatcggaaagaattagcctactcgtttgacatcccccaccagcaggatgtaagagagcgcgcccaccagcgcaataacggaaatataaaccagcgcaggggcaaaaccataatcctgggccagatagcccaccaccagcggaacggtgataccgcccagcccgccgacgaaattaaacatcccaccggtcaacccgataagccgcatcggcgcaagcgaagagaccagcgaccaggtaatggaagcgaagccgttaccgaagaaggccagcgccatcaggaccataatccacaccggatcgttggtatagtttgcgcccatgatgcaggtcgagatcagcaggccgcagataatcggggttttacgcgcggcgcctaatgagaaaccttttctcaccagcctgtccgccagccagccggagagcagcacgccaacaaaggcggcaagaaacggaaccgtggtcataaagcccgctttcagcgccgtaatccccttttcctgggtcagatagttagggaaccaggtcaggaagaaccacagcgtcgaggtcacggcaaactgtccaaggtaaacgccaatcagtttgcgatggaataccagcttccagtcggctttggtcagcggctgccgcgcctcttttttaacgggcgcatcgccgtccaccagaccaccgccgtcgcgaatataatccagctcggctttgctgatgcttttcgtcagacgcggcggctgataaaccttaatccaaatcagtgaccatacgatcccgatagcgccggtaacgataaatacccagtgccagctcagcatttcctgaatccacattaatagcggggtcaggaatgccagcccgacaaactggcctgaggtgtaaaaaccgacggctgatgcgcgctcgtgctccggaaaccagctggtcaccatgcgattattggtgggaaacgccggcgcttcaaatatcccggtaatcgcgcgcaggccaatcaacgacatcagccccgtggcaaatccctgcagtagcgtcgccaccgaccagccaaaaatagcgataaagtaggtcagcctcgagcccacgcggtcaaggaaccaaccgccgggaatctggcaaagcgtatacagccacgcgaaggcggaaaatacatatcccatttccgctttggtaataccaaactcttcctgaatatgcgccgatgccaccgcaaggttggcgcgatcaacataacaaatcaccacggtaataaagatcataatcagcgtcaaataacgacgacgcccgggttttgcagctgtaactgaaatatccatcgcaatctgtctccagattttgggcatagcgaggccgctcaccatgcccggtaatttacagagggtttatttaaattttttattaataacttaaccgtaatgcgctaaataatttgtgctggggaaaggcggcaaattttcgcattcccgggagcatacattagtatgtgactgggataagaaaatgcagccaacgcatcagcagcgcaaagtatgacgcgcatttaccattcggcgacgctaccatcctcatgccgccacaacggattacgccagtccggcgcattctgacttaattcaatgacccgcgcttcatcgatttctacgccaagcccgggcttcattaatggtttaaagaaaccgccttccatattgaagtcgtctttatttttcacaaagtcgagtaattccgcgcccttgttatagtgaatgcccatactttgctcctggaagacggcgttataggagacaaaatcgacgtgcaggcaggcggcaagcgcaacaggccccagcgggcagtgcggcgccagcgccacgtcgtaggcttcggccattccggcgattttatagcactcggtaataccgcccgcgtgcgacagatcgggttggagaatggccagcccaccggcttccagcacgcgtttaaactcgaagcgcgagaacatgcgttcgcccgccgcgataggaatcgaggtttgcgccgccagtcgcggataatattccgcctgctcggcaagaaccggctcttcaataaacagcgggcgatattgctccagctctttaatcagcaccttcgccattggcgcgctaacgcggccgtgaaaatcgagaccgaactcaatttcattgccgaacgcttcgcgaatttgcgcgacggtattcaccgccgcatccaccgcgcgagaattatcgatcagccccagctcttcgcagccgtttaatttgaaggtatcaaaaccaataccgcgcagcttcttgatgccatcaatcacctctgccggacggtcgccgccaacccagctgtaggctttgattttgtcacgcaccaggccgcccattagctgccagaccggcgcgttcagcactttgcctttaatatcccacagcgcctggtcgataccggcgatggcgctcattaaaatcgggccgccgcggtaaaagcccgcgcggtacatcacctgccacaggtcgttaatccgcgccggatcctggcctatgagataatcgccgagctcatgcaccgccgcctctacggtgcgcgcgcgcccttcaatcacgggctcgccccagccaaccacgccttcgtcggtttcaatttttagaaacatccagcgcgggggtaaacgatacgtggtgagtttggttattttcattgcactgcctctcgatacgctttaacaaatgctgccgcctgccgttgggtacgctctacggattggccagcgcgatagagatcgctgcccagcccggcaccggtacagcctgcttttatccactgcgccagattttccggcgtcacgccgcccaccgcaaaaacgggcacctccggcggcaaaacggcctttagcgctttgatgtagtcagggccaaaagccgaagatgggaagactttcaacgcctgagccccggcgtccagcgcggcgaacgcttccgtcgccgtcgcgcatccggggcaaaccgtcatgccgtagctcaccgcacggcgaatgacctcgggctgaatattgggcgtgacgataagcctgcagcccattcgggcaagctggtccacccgctctgcattaagcacggtgcccgcgccaatcagcgccttatcaccataagcctcaacaacggcgggaatactcttttcccactgcggtgagttgagcggaatttcaacggcgtcgaagccggcgtcgatcgccgcccccacgtgcgccagcgcctcttccggcgtaatcccgcgcaggatagcgataagcggtaagttagtttgccactgcatggatgatgctccttattcctgtctgaaatgcgttgtcgcccgacaccacgatggtctgacggccaatggcgctcagtgcctgctgatagcggttcgccagcgtctcgccggcgacaatggtgacctgctggtcgcgaaagcgttggctcagggtggcgacttccgcgccaatcagcagtcccgacagaaactcgccgacatgcgcgcgcggcagcgaatccagcacgtgtgaagcgcgaacctcaaaaagctgcggcaggatgtctggcgaatgcaggccgcgctcaagcccggcgttaaacgcgtcaggagcagagacctgctccggtaacccggcgccgaccagcgagtggcgcagcagcagatgatgcagttcgccggtcatcaccgtgcgaaagtcgttaatttgttggcggtctgcctgcacccatttgcagtgggtgccgggcatcacgtagacggaagaaggggctatcgcccgcgcgccgaggagctgagtctcttcgccgcgcatcacattatggttatcgtcgcgagagacgctgagtccgggaataatccagaccttgtcgctaacggcagttaattgttcaccaatggcggagaaatgaacgggaaccggcaagtagggtaccgcctgccagccgacgttactgccgaccattcctgccatcaccgccggggtcgcgccgtcgcgccagccccgggttatttcgctaaacaccgcggcgggggagtgtccgttcagacgcgtgacgcctgcttccgattgcctgctctccaggcaccgttcgccctgatagagccaggcgcgcaggttggtcgatccccagtcaattgcgatgtagcgagatgtcatgtgatttcctttaaccttcgtgtcgagctggcgatcatggtgagcgccgcctgctccgccgcttcgctgtcctgatgccggatggcgtcaaacagcgccttatgttcctggagcgttttcggcatgttggcctcatcgcccatccacgttctttcaaataccgcccgctgtagcgagctgatcgccacgttgagctgctgcagaaccgggttatgcaccgactgcagcaccgcctcgtgatagcgaatatccgcttcgttaaacgcttccctgtcctggttattggcgatcatgtcgttgagcgcttcttctatttgcgccaggtcgctcgacgtcgcgcgctctgccgcccagcgggcgatcgcgggttcaaccaggttacgtacctcgctcatcgcgctaatcagccgcgggtcgtaatcactctccagcacccactgtaaaacgtcggtgtcgagataattccactggttgcgcggggtaacgaacgcgccgcgatagcgcttcatttcaatcagccgtttagccatcaacgaacggaacacttcgcgaatgatattgcgcgaggtggcaaactcctcacacaggtcggcttcagcgggcagcgcagagccgggaacgtatttgccgctgacaatctgcttgcccagcgtgatgacgatgcgatcggttttattgagagtcatggaaagtccttgtgctctggatgtctctctactttaccgcgacaggcggttttaaccgcaactttgtagtactaacgtgatgtcactcgtcattgctatggacacaatgtagtacaacacaaacatgttgtactacaatttagatcacaaaaacgacaattcggtttggtgattttgcggcggggtaaactcaaggcataaaaaaacccgcgattaacgcgggtttttcagaaagagatttttagtttaagacatatttttcaatagcatatgccacaccgtcttccagattggatttggtgataaagtttgccgcttctttgacggccggaatcgcgttatccatcgccacgccgacgccagcgtattcaatcatcgcgatgtcgttttcctgatcgccaatcgccatcacctcttccggctggatgcccagcgcatcggccagcgatttcacgccggtacctttggtgacgcgtttatcaagaatttcaaggaagtacggcgcgcttttcagcacggtgtacttctctttcacctcagccggaatgcgggcgatagccttgtccagaatcgccggctcatcgatcatcatcactttcagcagctggatattcggatccatcttttcggcttcgcagaagaccagcgggatcgtcgccacgtaggattcatgtaccgtgtaatagctcacatcgcggttcgcggtatacagggtgttacgatcgagcgcgtggaagtgggagccgacatcgcgggccagctgttccagatagcggtagtcgtcgtagcccagcgcggtttgcgcaacggtactaccgtcgctcgccttctgcactaaagcaccgttataggtgatgcagtaatctccaggctgctccatatgcagttctttcagatagctgtgcacgccagcgtaaggacggccggtggtcagcaccacgttgacgccgcgttcacgggctgcggcaatcgcggttttcaccgcaggagagatagtatggtcaggcagcagcagcgtgccgtccatatcgattgcaatcagtttaatagccatgaaatccccgggtaagatgagtccttactcatgctaacgcgattaagcccacaaaaatagagctacattgcgcagcagaacccccccttttaggcaagatccggggaacggggtcttactcgcgggtgagcacgattttgccaaacgcaccgcgatcgaggtgttcaagcgcctgtgcaagctggttaaagcggtaacggtgctcaatcaccggtttcagcctggtcacgtcaacggcgcggacaaaatcttccagtgcgcgacggtgccccacgccaataccttgaatcaccggggatttcagcaacagttcgcctgccggtagcgagatttcactgccggccagcacgccgatgaccgaaatacgcccatgaaccgccacggcgcgcagggaatgcctcaggttctccccgccaacggtttcaatgatgtggtcgatgccgcgatcgttcgtcagttcgtatatcccttcagcccagtcgcccttaagccggttgatgccataatcggcgccgagttgtttggcccgcgccagtttttcatcgctcccggacgtgacaaaaacctctgccccctgcgctttggcaatttgcaaagcgaatatcgccacaccgcccgtgccctgcaccagtaccgattgcccggcgcgtaaatgaccgcgctccaccagcgcgaaccatgcggtaagcccggcgcacggtaacgtgctggcctcgacgtcatccagggtttccggggcggccaccagcccgttttcattcacaatcacgtactcagacagcatgccctggaagtaaccgccggtcgttttatagggcaaagtgcgggcgtccgctgttggcctaccgtcgatccactccgggaaaaaggtcgagatgacgcgagcgccgggtgtgaaacgcgtgacgccctcacccgtactttccaccacgcccgccatatcggacgccggcgtaaacgggaaggaaagcgcaatcggcatggtgccttcaatgaccattttatcgcgatagttgagcgcaacggcattcacccgtacgcggacttcacccggccctggctgcggaacaggcgcctggatgagtttgaggttgtcgcgcccgagggcgtccatggaccagcgttgcattgtctcagtcattttttctctcctgccattaaataagcttcaggagcgacagtctaccgttgactcagggtcgccagtggcgataagttttcccattattgatgaaagaaaagatacaatctatgaccgatacgctgaaggatattccggtttttgtggccgccgttgaggcggggagttttgctcaggccgcaatccgtttgcacttgtcgcgttcggcggtgggaaagagcatcgctcgccttgaggagcgactgggggtacgtctgtttcaacgtaccacccgcagccagagcctgaccgacaacggcgcccttttttatgaacactgcctgcgcgcgctggaggaaattcggggcgcagaattgctgctggaaacggggaaacagcaggtcagtggccgcctgcgcgtggccatgccggtgctgtttggccgccagtgcgtcgccccgctgctgatcgcgctggcgcaggaacatccaggccttgagctggagatgtcattcagcgatcgcgtggtggatctcgtcgaggaagggtttgatatggcggtgcgtaacggcacgcttcaggacagcagcgttctggtcgcccgaaggctgggagaacaccgcatggtgctgtgcgccgcgccggattatctgctgaagaagggcacgccgcaaagcgttgatgatttaccccatcatgcggccattaactatctgcaggccggcagagtactctcctggcaactgatggatagcgaaggtgcctcgcacaccttcactccccgttcatcgctcaatatggatgatttgcaggcgatctgcgacgctgcactggccggacacggcattgcatggctgccctgctggatggtcagcaaagaaattcatcagggaaaactcgttccgctgttaaagcaggcgccggatgtgcgcttcgacgttcacgcggtctggcaacagacgccgcatctaccgctgagggtgagaattgccgtcgatacgctcgccagccgcttaccgtccgtgatgtcgctggacaggcctgcgcccacaaaaaagccgcgctaaacgcgcggcctgagtatggcggtgtacgacgattaaatatcgatgtttgccgctttgagggcgttctcttcgataaaggcgcgacgcggttcaacggcgtcccccatcagggtcgtgaacagctggtcagcggcaatcgcgtccttgacggtcacgcgcagcatgcggcggctgtccggatccatggtagtttcccacagctgatccgggttcatctcaccaagacctttatagcgctggatagagaggccgcgacgggactccttcaccagccagtccagcgcctgctcgaagctggcaaccggctgacgacgttcgccgcgctcgataaaggcatcgtcttcaatcagaccgcgcagcgtttcgcccagcgcgcagatacggtggtattccggcccggtgacaaactcgtgatccagcgggtagtcggtatccacgccgtgggtacgcacgcgaacgatcggctcaaactgctgcagctcggcgttctcgcggacatcaaatttccactggctgccgtgctgctctttctcgttcagctcgctcaccagggcgttgatccagcgcgttacggtctgctcgttcgccaggtcggcctccgccagcgtcggctgatagataagctctttcagcagggctttaggataacgacgttccatacgcgtaatcattttctgcgtggcgttatactcggcaaccagtctctccagcggctcgccggctaaggccggcgcgttggcgttggtatgcaaagtggcgccatccagcgcgatggagatttggtactgatccatcgcttcgtcgtctttaatgtactgttcctgcttgcctttcttcactttgtacagcggcggctgggcaatgtagacgtgtccgcgctcaacgatttccggcatctggcgatagaagaaggtcagcagcagcgtacgaatgtgcgagccgtcgacgtccgcatcggtcatgatgatgatgctgtggtagcgcagtttgtccgggttgtactcatcgcggccaatgccgcagcccagcgcggtaatcagcgtcgccacttcctgagacgcgagcattttgtcaaagcgcgctttctcaacgttaaggattttacctttcagcggaagaatcgcctggttcttacggttacgcccctgtttcgcagagccgcccgcagagtccccttccactaagtacagttcagagtgcgcggggtcgcgttcctgacagtccgccagcttgcccggcaggccagccagatccagcgcgcctttacggcgagtcatttcacgcgcgcgacgtgcggcttcgcgcgcgcgcgccgcgtcgatgattttaccgaccacgattttggcgtcagacgggttttccagcaggtattcgttcagcagttcgttcatctgctgttcgaccgccgatttcacctcggaagagaccagcttgtctttggtctgcgaggagaatttcggatccggcaccttcacggagaccacggcaatcaggccttcacgggcatcgtcgccggtggcgctgactttcgcttttttgctatagccttctttatccatgtaggcgttcagggtacgggtcattgccgcacggaagcctgcaaggtgggtaccgccgtcgcgctgcggaatgttgttggtaaagcagtagatgttttcctggaaaccatcgttccactgcagcgcaacttcaacgccgataccgtctttttcggtggagaaatagaagatattcgggtggatcggcgttttgtttttgttcagatattcgacgaacgctttgataccgccttcgtagtggaaatgatcttctttaccgtcgcgcttgtcgcgcaggcgaatcgacaccccggagttcaggaacgacagctcgcgcaggcgttttgccagaatctcgtattcgaattcgaccacgttggtaaaggtttcgtagctcggccagaagcgaaccatggtgccggttttttcggtttcgccggtaaccgccagcggcgcctgcggcacgccgtgggcataaatctgacggtgaattttgttatcgcgctgaatgaccagctccagcttctgcgacagggcgttaacaacggaaacgcctacgccatgcagaccaccggaaactttatacgagttatcatcgaatttaccgcccgcgtgcagaacggtcatgatcacttccgccgccgacacgccctcttccgggtgaataccggtaggaataccgcggccgtcatcctgtacggagacggagttgtcgctgtggatagtaacaacgatgtctttacagtaacctgcgagcgcttcgtcgatagcgttatccacaacctcgaataccatgtggtgcagaccggtgccgtcatccgtgtcgccgatatacatacccgggcgcttacgcaccgcatccagccctttcaggactttgatactggaggagtcataagaattcgacatcaacgtttctcgctcatttcatcttaggttaatccgctattttacccttttccacggtaaacatcttcgaattttcgtccgacatgtccataacgtgttcagcgctaatggcgctgacgaaaacctgcgactgcgtggcttttaagcggctggccagcagcccgcgccgagcgtcgtcaagttccgaggcaaaatcatctatcaggtacaggcagcgccgcccgctttcacgggtcagaaactcgccttgcgccagtcgtagggcgcacatcagcagcttaagctgcccgcgcgacaatgtatcctctaccggcgcgccgtcggcacgaatgcggaaatccgctttgtgcgggccgtgggcggtataggttagcatgcggtcgcgttcgaaatttcgctccagcacctcggcataatccgtttctttctcccagccgcgctggaaagagaaggtgagagcaaactccggtaaaaactgccgacaggtatccgccatgtcttcgacgatagcggcactgtattcggcccgccagcggctgatttgctccgccagcggtatcagctccagatcccagggccgcagctgcgcatagcggctgacctgacgcagcgcggcgttgcgctgcttcaccagccgcttcaggttgctccaggcggtaaagaatccggcttcgttgtggaagcatccccagtcaaggaacgctcttctgtatttggggccgccgttgagtaaagtaaacccctcgggcgtaatcagctgcatcggcatcaggtgcgccagctccgccactttatgcccgtcagtgccatcgatacgcaccttgctgtcgccctgcttatcttttgtcagaccgatagatacttctcgctcttcgccctgcaggcgaccgtgcaggacaaaggactcctgctcgtgacgaatcacgcggccaatctgcaaactacgaaacgcccgaccatggccaagcgtgtagatagcttcaagtacgctggttttgccgctgccgttggcgccaaccaggaagttaaagccgggagatagggcgagatccgcattttcaatattgcggaagtctttgattagaagtcgggatagcgacatatcagctcataaccagggcgttatcggcgcagttagtctggttacggccagcgcgcagcaaccggagcgtactaaagtacgtgaggattgcgagcactgcccggagccagaataacaagtaagatagcccgatattttctacagcctcataggcatgacgacataggctgcggattgcgaagccgcatcctcaatctgcacgctcgacacggaatcggtcagcagaatacgcacattctcgcacttcagcgcgttaagcacatccagtacatagctgacgttaaagccgatttccatctcagtcccggcataggtgacgtccagaatctcttccgcttcttcctgttccgggttattggcggtgattttcagctgattttcactgacgtaaaggcgcacgccgcggaatttttcgttagaaagaatcgccgcgcgggcaaaggcctgcttgagaatatcgcagccggcatccaggtgcttatccgggtttttcggcagtacgcggcgatagtcagggaaacgaccatccaccagctttgaagtgaagataaagtcgccaacgtgagcgcggatattgttgctgccgatctgcacgcgcagcggggtatcgccgccgtcgagcatacgcatcagctcaatcacgcctttacgcggtacgatcaccgaatgattgggcagggactcttccagcggcatcgagcaaaccgccaggcggtggccgtcggtcgccacggtgcgcagttcgctgccttcggtttcaaacagcatgccgttcaagtaatagcgaacgtcctggtgagccatcgaaaactgcgtcgcctcaatcaggcgcttcatggtcgcctgcggcagggtaaattcaacttcgctctgccagtcatcaaggttggggaaatccgctgctggcagcgtagagagcgagaagcggctgcgaccggaacgcaccagcatacgctcgccttccagctgtaccgcaatctctgcgccttcaggcaggccgcggcagatatcaaaaaatttacgcgccggaacggttgttgctcccgcttcgtgcggctgaatcagcgcaacgcgcgcgaccatttccatttccagatcggtaccggtcagcgacagcgcgccatcggtaacctgaaggagcaggttgccaagaatcggtagcgtcggacgaccacctaaaggaccgctcacctgttgcagcggttttaataaatgttcacgttctacggtaaatttcatagcgtcacgaggataatgttctgattaaattggaaaaatcttctttgatatcgtggctttcttcacgcagttgctcaatcttacggcaagcgtgcaggacggtggtatggtcgcggccgccaaacgcatcgccgatttccggcagactgtggttggtcagctcttttgccagcgccatcgccatctggcgggggcgcgccaccgaacgggagcggcgtttagacagcaggtccgctaccttaattttgtaatactccgccaccgtcttttgaatattgtcgatggtgaccagtttttcctgcaaagccaacagatcgcgcagcgcttcgcgtacgaaatcgatggtgatcgcccggccggtaaagttggcgttggcgataacgcggttcagcgccccttccagctcacgtacgttagagcgcaggcgcttggcaatgaagaacgccacttcgcccggcaggcggatgtcgttttcatcggcttttttcatcaggatcgccacgcgggtttccagctcaggcggctcgatcgcaaccgtcagcccccagccgaagcgtgatttcagacgatcttcaaccccgttgatctccttcggatagcgatccgacgtcaggatgatctgctgattgccttccagcagggcgttaaaggtgtggaaaaactcttcctgcgagcgctctttattagcaaaaaactgaatgtcatcgatcagcagtgcgtcaacggagcggtaatagcgcttaaattcttcaatggcgttgttttgcagggcttttaccatgtcctgtacaaaacgctcggagtgcatgtaaaccactttcgcattgggtttacgcgccacaattccgttacccaccgcatgtaaaaggtgcgttttacccaggccggtgccgccataaagaaacagcgggttgtacgcgccgccgggattatccgcaacctgacgcgccgccgcgcgagccagctggttggatttaccttcgacgaagttatcaaacgtatgtttgacgttgacgttagagcggtaggtcggttctgccggcgccggaacgttatcccagcccggacgcacgatagtgggcgcaacgcgcgccgtctggatctgctgcgcaggcgctgcggccgcaacgcttaccgtacctctctgcatctgaacggcaggcttagcgcccacctcaaaccgcagctgtggggcatccgcaccgcaaaaatcattgaggagtccattgatattattgaggtatttatcccttacccaatcgagcacaaaacggtttggcgcatacagtgccagcgtgttatcgctcaattccgcctgcaaagggcgtatccacatgctgaattctgtggctggtaactcatcctgcaatcgggcaagacactgctgccaaagcgaaagtgacacggcggactccactcgaacaaaaatcgatatataaagagaaactgaaacaatcgtgattgttggcacacgtcgacaagaccctgcatagccgaaaagcccctgcacaaaaggggtgacgtgcgaaccgctatctgcggttattacccgatgcggatctctggatcccgatcgggaccggggatcatagcctaaactgagaaagagatcttgtgtttctcaacagattcttcccgatttatccacaggaaggatcgaagctgggtaagtgtaatcgatcctggctggagtggggcacgatttcagccgcatattggaaaaattaatgaactatcctggttttgggcttaatcgatctaacaaagatcctttgcgatccttgcgctttatccaccaggtcgtataatccaccacccggcgcgtaaagcccgttttccgcagcgtgccatcgcctgttttttgtgcggcaaggtgcgagaaataaggaaagagaattgactccggagtgtacaattattacaatccggcctctttaatcacccacgctgaggcgtaggccgttcgaaattcgttcggatttacgcgaaagtcagtgaaattattcaagtttaggtagaaatcgccatgaaacgcacttttcaaccgtctgtactgaagcgcaaccgttctcacggcttccgtgctcgtatggctactaaaaatggtcgtcaggttctggcacgtcgtcgtgctaaaagccgcgctcgtctgaccgtttccaagtaataaagctaaccctgagtggttaagctcgcatttcccagggagttacgcttgttaactcccagtcatttcactttcgtcttccagcagccattacgggctggcacgccgcaaatcaccatcctcggccgccaaaattcgctggggcatccccgcatcggtcttaccgtcgccaagaaaaacgtcaagcgcgcgcatgaacgcaatcggattaaacgtctgacgcgtgaaagcttccgtttacgtcaacatgaactcccgccaatggatttcgtggtggtggcgaagaaaggggttgccgacctcgataaccgtgctctctcggaagcgttggaaaaattatggcgccgccactgtcgcctggctcgcgggtcctgataggcctgattcgggtctatcagcgcctgattagtccgctactcgggccgcactgtcgtttcacgccgacctgttctcaatacggaattgaggcattgcgcaggtttggattgataaaaggcagttggttgacggtgaaacgcgtattaaaatgccaccctttacaccctggtggtgacgatcccgtcccgcctggaccatttgataccagagaacactaacgatggattcgcaacgcaatcttcttatcatcgctttgttgttcgtgtctttcatgatctggcaagcctgggagcaggataacaatcctcaaccccagcagcagaccacgcagacaacgaccacagcaacgggtagcgccgccgaccagggcgtaccggccagtggccaggggaaactgattacggtaaaaaccgatgtgcttgacctgaccatcaacacccgcggtggtgatgttgagcaagcgctgcttctggattatccgaaagagctgaagtcaactgagccgttccagcttctggaaaccacgccgcagtttacctatcaggcgcagagcggcctgaccggtcgtgatggcccggacaacccggctaacggaccgcgtccgttgtataacgtcgataaagatgcgtttgtgatggctgatggccagaacgaaatcgtcattcctctgacgtacaccgataaagcaggcaacgtattcaccaaaactttcaccctgaagcgcggtgaatatgcggtgaacgtcggctatagcgtgcagaacgccagcgaaaaaccgctggaactgtcgacctttggccagctgaagcaaaccgccaacctgccgacgcatcgcgacacgcagaccggcggtctgacgacgatgcacaccttccgtggcgcggcgtactcaacgtctgaaacgaagtacgaaaaatacaaattcgatactatcgtcgataacgaaaacctgaacgtcagcaccaaaaacggctgggttgccatgctgcagcagtactttactaccgcatgggttccgcagaacaccggtactaacaacttctacaccgcgaatctcggcaacggtattgtggcaatcggctacaaatctcagccggttctggtgcagccgggtcaaaccgataagctggaaagcaccctgtgggtcggcccggctattcaggacaaaatggccgccgttgcgccgcatcttgacctgaccgtcgactacggctggctgtggtttatctctcagccgctgttcaaactgctgaaatggatccatagcttcctgggcaactggggcttctccatcatcgtcatcacctttatcgttcgtggcatcatgtacccgctgactaaagcgcagtacacctccatggcgaagatgcgtatgctgcagccgaagattcaggcaatgcgcgagcgtctgggcgacgacaagcagcgtcaaagccaggaaatgatggccctgtataaagctgagaaggttaacccgctgggtggctgcttcccgctgattatccagatgccaatcttccttgcgctgtactacatgctgagcgcctcggttgaactgcgtcatgcgccgtttatcctgtggatccacgacctgtctgcgcaagacccgtactacatcctgccgatcatcatgggcgcgacgatgttcttcatccagaagatgtctccgaccaccgtgaccgacccgatgcagcagaagatcatgacctttatgccggtcatcttcacggtgttcttcctgtggttcccgtccggtctggtggtttactatatcgtcagcaacctggtcaccattattcagcagcagctgatttaccgtggtctggagaagcgtggcctgcatagccgcgagaagaaaaaatcctgatactcttgaattattttgagtatttacggtaacgttaatgccagagaaggcggtcattagaccgccttttttacatctacatagagagtcaccatgagccataacgacactatcgtcgcccaggcaaccccaccgggacgcggtggtgtgggcattctgcgcatctctggcctgaaggcgcgcgacgttgcgcaggcagtgctgggcaagctgccgaagccgcgctatgccgactacctgccgtttaaagacagcgacggcagcgcgctggatcaggggattgcgctgtggttccccggcccgaactcctttaccggcgaagacgtgctggagcttcagggccacggcggccccgttatcctcgacctgcttctgaaacgcattctgacgctgccgggcgtgcgcatcgccaggcccggcgagttctccgagcgcgcgtttttaaacgacaagctcgacctggcacaggcagaagccattgccgacctgatcgacgccagctccgagcaggcggcgcgttctgcgctgaattcgctgcagggcgcattctccactcgcgtaaaccatcttgtggaagcgctgacgcacctgcgcatctacgtggaagcggccattgatttcccggacgaggagatcgacttcctctccgatggcaaaatcgaagcccagctaaacgacgttatcgccgatcttgacgccgtgcgcgccgaagcgcgccagggcagcctgctgcgcgaagggatgaaggtcgtcattgccgggcggccgaacgccgggaaatcaagcctgctgaacgcgctggcgggccgggaggcggctatcgtcaccgatattgccggtaccacccgcgacgtgctgcgcgagcatatccatatcgacggtatgccgctgcacatcattgataccgccggcctgcgcgatgcgaacgatgaggtagagcgtatcggcatcgaacgcgcctggcaggagattgaacaagccgatcgcgtgctgtttatggtcgatggtaccaccaccgatgcgaccgatccggcagatatctggccagattttatcgcccgtctaccgaaaaacctgccgattaccgtggtgcgcaacaaggcggatatcaccggcgaaacgctggggctgagcgaagtgaatgaccactcacttgttcgcctttcggcgcgtaccggcgagggcgtagacgtgctgcgtaatcatctcaagcagagcatgggctttgaaaccaatatggaaggcggctttctggcgcgccgccgccatctgcaggcgctgtccgacgccgcagaatatcttcagcagggtaaagcgcagctgctgggcgcctgggctggcgagctgctggcggaagagctgcgcctggcccagcagagcctgagcgaaatcaccggcgagtttacctccgacgacctgctgggacgcattttctcaagtttctgtatcggtaaataagctcagtatgtgagcattgactaacccgcattaacgtcctgttaaagcgggttaatttttttcctttagcgtcttcacggcgtatcgctttgtctattacccttatcggtaccccccacttaccggatacgacaatgatggctgattacacctttattgataccgtcccttcggcggaagatttttgtcgcctgcgcgtcatatcaggtatgtcgccgcgcccgctggaaggcgcccgcgcgggtctgccgcgtagctgctacggcgtgcatatcctctatgcgggcgtgcccgttggtatggggcgcatcgtcggcgacggcgcgctgaactttgaaatcgtcgacgtcgccgtggacccggcccatcagggaaaaggtctcggtcgccagatcatgcagaaaatcgtctcctggctggatgaaaacgcggttaaaggggcatacgtctcgctggtggcggatgttcccgaactgtacgccaaatttgggttttccagcgtcaggccagaaagtgaaggtatggccaagatctggaaataatgcgggacgcgatcgctttattggaaatatcaaaaagcgatataaaaacaaataattaaattatctccgcacatcttccaaccgtttttcctcccgggaaatcgttgttgtccaaatggcaactcgtactcccgcacgaaccccactattctgtacggcattcttatgcgaggggttctatggcacgctttcttatctgcagttttgcgctggttctgctttatccatccggcatcgatatgtatctggtcggtctgccgcgcattgcgcaggatctgggggccagtgaagcgcagctgcatatcgccttttcggtttatctggcgggaatggccgcggcaatgctgtttgcgggtcgtatcgccgataaatcaggacgcaaaccggtggcgattttcggtgccgtggtcttcatactggcctcccttctctgctcgcaggcgcaggtcagcgcccacttcctgattgggcgttttattcaggggattggcgcgggcagctgctacgtcgtcgcctttgcggtgctgcgcgataccctcgacgatcgccgccgggcgaaggtactttccctccttaacggtatcacctgcattattccggttctggcgccggtactcggccacctgattatgctgaaatacccgtggcagagcctgttctataccatgacaggcatgggcgttctggtgggactgctctcggtctttatcttgcgggaaacgcgccccacagccgcgccacatgcggcgatgcagcaaaataatgtccccgagtcgctgcttaaccgcttttttctcagccgaataatcataaccaccctgagcgtgacggctatcctgacttacgttaacgtctccccggtgctcatgatggaagtgatgggcttcgatcgcggcacctattccatggcgatggcgctaatggcgcttgttagcatggtggtgtcgttctcaacgccgttcgctttgacgctatttaagccccgcaccctgatgctgacctcgcaggtgctgttctttatcgccggcgtgctgctgagcctctccaccagccagacgatgacgatgctgggtctggggttgatttgcgccgggttctccgccggctttggcgtagcaatgagtcaggcccttgggccattcaccctgcgcgccggcgtggcgagttctgttttgggaattgctcaggtctgcggctcttcactgtggatttggctggcggctatcatcggactcagcgcgatgaatatgctgatcgggatacttattgcctgtagcatagtgagcattgttctgattatggtcacctctccggcgcgggccgcgcaacgctatgaagaaacccctgtcgagtctcgatcttaacctgctgctgtgcctgcagctcttaacccaggagctcagcgtcacccgcacggcgaagcggatgaacgtttcgccgtcggcggtgagtaaatcgctggctaaactgcgcgtctggtttgacgatccgctgtttgtcaaaacgcctctgggactgtcacccacgccgctgatgagcagtatggagcaggatctggcggactggatgcagatgggtaatcagatcctcgataagcctcatcataccatgccgagcgggttaaagtttgagctggcggcagagtcgccgctgctgatgatcctgctgaatacgctttcgcagcggatctaccagcgctatccgcaggcgctgatccgcctgcgtaactgggattatgattcgctggatgcgattattcgcggtgaagtcgacatcggtttttgcggccgggaaacccatcctcgctcccgtgaacagctcagcctgctgccctggtatatcgattttgaaatcctgtttaccgatctcccgcaggtatggctgcgcgccgatcatcccgcgctgaacgaagagtgggatctggacactttcctgcgttatccgcatatcaatatctgttgggaacaaagcgatacctgggcgctggatgatgttctgcacgatctggggcataaacgcaccgtggcgttgaccgttccgggttttgagcagtcgctgtttatggcggcccagcctcatcatacgatgttggccaccgccccgcgctattgccagcgttacaatcaacagcaccatctgccgctggtttcactcccgttgccgctggagccgtcccagctggagaaaatacgcgtccccttcaccctcctgtggcataagcgcaacagctacaatccgaagatcgtctggctgcgagaaacgctcaggcagctctatgtggaaccgctctagcgttggattagcccgtcttgcgcaataaattgtaaaatttatgcaatttattgcgcaaggagtgatttccgcattaaaacctggcaattctgagcgataatataattcgcaatttttatcattgaccattaatcacggagcgacgaatggcaacgcattttgcaagagggatactcaacacccgggaaccgctatctacacgcctgtcagcggcctgtcatcaatccgccagccgcctgcctgagtaccgacaaagccgctatcgcgcatcacggtcactcctcgcagaactcctctttatgctgtatggcatcagcgaacttcctgaaattattgacgaagagaatggaaaacccgctttccgcgacgaaaatctcccgcgtttttccatctcctatgccgggaatattgtcggcgtcgcgttatccaccgaaggtgattgcggcctggatatggaattaccgcacgcctcccgtagtttacatgcctcgcccgacgccgaccgctacgtctttaacagtaatgagcgggtatggattagcaaccagcacgatcccgatgaagcgcgcgctcagcttgacgcactccgcaaaagcgtcatgaaactgaccggtgaaaacgccgttaacctccagcttcttccgggctccggacgattacggacaagcgggacgcagtcaatcgaagcggtgtgcgatgccgaaacggtgctggtctggtccatcgccgccagtccggatatcggccagctgaaagtctgggaatataatggtaaagagggctggcgtagcctgcccgacgcgcaggctcgcgccaaagagccgtccgcccggctgatgcgtttcactcatttaccggtagaaaaagccttctccctcaactgaccggataacccggccatcatgatgcaaaggagcaatcatgtctgatacgttgaaagttgttacgttactcggaagtctgcgcaaaggctcttttaatgccatggtcgcgcgtaccctccccggcatcgcgcccgcaggaatggcggtttccgcgttaccgtccattggcgatattcctctctatgatgccgacgtccagcaggaagagggatttccacaaagcgttcaggatatcgctcagcaaattcgcgaggctgatggtgtggttatcgttacgccggaatataactactcggtgcccggcggcctgaaaaacgccatcgactggctgtctcgcctgccggaacagccgctatccggtaagccggtactgattcaaaccagttcaatgggcgcgattggcggcgcgcgctgtcagtatcatttgcgtcagattctggtattcctcgacgccatggtgatgaataagcccgaatttatgggcggcgtgattcagaacaaagtggatccgcaggaggggaaagtcgtcgatcagggcacgctcgatcatctgagcggacagcttagcgcttttgccgaatatattcagcgggttaaagcctgacagacgccgtcacacttgccagaacggctgagtgtgacggcgcgggtattaatgcacgtcaataaatacaattttcagcacaaacagcagcgaaaccacaatcacgcatgggctgaggtcgcgcagtcgaccggtaccgatcttcattacgcagtaagagataaagcctaaggcaataccttccgtaatggagaagctaaacggcatcatcacggcggtaataaatgccggtactgattcggttaaatcatcccacttcacgcgcgccaggctggaggtcatcaggacgccaacgtaaatcagagcgccggctgcggcataggccgggaccatacccgccagcggcgacaggaagatcaccagcaggaacaagagaccaacgaccacggcggttaagccggtacgtccgcctacggaaacgcccgaggaagattcaatataggcggttacggaagaggtgccgataaaggagcccgcaacggacgagacgctatcgacaaacagcgcctgcttcatccgcgggaacttgccctgcgcatcggccagaccggctttatcggtcacgccgatcagggtgccggaggagtcgaacaggttcaccagcataaacgagaagatcacgcccgccaggccgagattcagcgagcctgccaggtcaacatgcccaatgaccgtcgtgacgctcggcggcatggatacgatgccggtgtagtgaacgtcgcccagcagccagcccagcagcgtggtaaccacgatagaaaccagcaccgcggcgtggatgttgcgggaagccagaatcgcaataataaagaagccaagaatgcccagcagtacgctgtgggacgtcaggttgccgatgctcaccagggtttccgggttggcgacgatcacgccggcgttcttcaggcccatcataccgatgaacaggccaataccgctggtgataccgatacgcaggctaaccgggatattggcgatcatccagtagcgtacgcggaaaatcgtcaacagtagcaggccaaccgccccccagaaaatcgcgcccatcccgacctgccacggcaggcccattgcctgtaccacgacaaacgcaaagaaggcgttcagtcccatcgccggcgccagggccaccggaaggttagcgaacaggcccatcatgatgctgccgaacgcggcgatcagacaggttgtgacgaacacggcgctggtatccatacccgccacgccgaggatctgtgggttaacaaaaacgatgtacaccattgtcagaaaagtggtgaaacctgcaatcgcttcggtgcgtgccgtcgtgccgtgttcacgtagtttgaacacgcgctccagcagacccgggccagatgactggctggtttgttgttgactcattatcggtttccgaacaaaggagggaaaattcgtcgctatcctataccaaaatgcgacaataagggcggttgtgagatactttttttcatcgattttgcttatacggcaacgattgcgtctcactaatcagcaagacgaaaacgttaacttattaaaatggaaacgacatgacccaaccagaagcagtatttttcgactgtgacggcacgctggtcgacagcgaggtgatctgctcccgcgcctacgttcacatgttcagggaattcggcattacgctggatttagacgagatttttaagcgcttcaaaggcgtcaagctgtacgagattatcgacaccattaacgcggagtacggcgttaatctggacaaggcgacccttgagccggtgtaccgcgatgaagtcgcgcgcctgtttgatactgaactggaagtcatttctggcgcacaggcgctgctggacgcggtcaacgtgccgatgtgcgtggtctccaacggcccggtgagcaaaatgcagcactctctcggtaaaaccgcaatgctgcaccatttcccggagcgtctgtacagtggctacgatatccagcgctggaagcccgatccggccctgatgctgcatgccgcaaaagcgatgaacgttaacgtcgagaactgcattcttgtcgacgactccagcgcaggcgcgcagtcggggatcgccgccggcatggaagtgttctacttctgcgccgatccgcataataagccgatcgaacatccgaaggtgacgacgtttacccgcctggaagagctacctgagctatggcaggcgcgcggctggaatataacgcgataaacctggagcgtagcgctatcagggcgcgtcccgcctgcgctacgctgaaagtggattacggttgactcaattccgcagctgccgctttatcagccacaatcaccagggaaggatgtaatttcaacaccgaagccggaacccgctcgctgacttcgccttcaatcacctgccttagcgcctgcgcttttgccgcgccgctgacgataagcagcaggtttttcgccgccatgacgctttttggccccatcgtgacgtagctatccggcaccgcagagaagtcgccgcccatctcgccgtgagcgacaagatccaccatatcgccgacgatagggacttccaccgtcgcatcgtggaagcgcgtggtattcggcaaattaccgcaaaaatggccgtcagcgccgaggcccatcactatcagatcgaggcccccttcgtcctgtaaccgctggtcgtgatgcctgaagttttcatggctgagcgggtggatattctcttcagggatttgcgcgggggtgaaaaacaggctgcgcagattagaaatggtcacgccttcacgatcctgtccgcggaacggaatctcgtcaaagttgtaataatggacctgagaatagaacgatttacctttaaccgcgtccgtcagatgttcatacattttcttcggcgtacttcctgccgttaccgccaggttcaccctgcgcggcgcggtgatgtagcccagaacgtgatggctggcgaccaggctcatctcggcataatcttccgtcacgattaatttcatattgtctccctcaaggtattgaagataaggagccagcgaactggctccttcatgttatttgaacaacttctgtacaaattcggcgtaggcgggacgccagacgtccatttcatggttcaggcccggatactcatggtaatcaaagttgattttctgcttctccagatccgctttcagcccggcgatatccttgccggtaaccacgtctttctcgcccacgacgacggtaaagttacgcagctgcttgttgatcgtctgtgggttgtgtagctgcgcctcgacgccggcatccggtaccgtggttgtcgttacgccgctgaacgtcgccagccagccgaagctctccagatggttcattccggagaccagcgcctgataaccgccctgcgacagcccggcaagcgcccggccgtccgcgtctttacgcacgttaaagcgcgcatcaatcagcggaataatatcgttcatcagctctttatcagccgctttcgcattcagcggatagaaggttttacgccgctcctgcggcgggaagttttccgcaaccgcgtcaggaatatcggtttcggtatccggcaccaccaccagcatgggcttgattttgccttccgccagcaggttatccatgatttgcggaatacggccctggtcgatggccgacagtccgctgtcgccaaaaccgtgatagaaatagagcaccggcagcggttcgccggtaccggtatagcctggcggcgtccacacgtagacgcgacgctcagcgttcagcgcctttgaatgataggtcagggttcgtagctcgccgtgagcgaccgcgcgatcgtcaagaatgctgccggggaccaggatcaggctggtattcacctgacgctgtggcttctgatagcggctaccggtatcgacggaacggaatccgtcgacatcaaaatagtattcgtagagattgggagccagcgcatcgcttttccatgtccagaccccctgctcatctttactcatatcatgcgagacaaaggtatccggcgttgcccccgttaccacggacacccgttttgcatccggggcaaacaggcggaaggtgatactcttatcggcgttaacctgggtaatatactggctgaccgggatcgccgcgctcggcgtggccggaaacggcgcggcatgagcggtaaacgccgcgcccgccagcgccagagcgaagtaaatagcatgtcgtttcatcgttaatcctctttagaattttgtcctgaccgttgccagccttaccaccagatttcagcctgagcgccaacggcaaactgatcgttcttaccatcttcaaaaatgctgctggtattgctgttagccgccttatccaggtcgatatccttcgctttaatataagtcgcatagaaacgaatttccgggcgggaggtcagcatactggtattcactttaaaggtatggaacagggtagttttgtagccggattcgttatatttcttgccggtactatctttgttctgctgcttgaaatagcccaattcaacgccggtctgattatatttatcccagatccaggccgggcgcacgacggcgcgaagagactcaaaatcggagtgcgcgccggtctcgtagctgtagacatcattaccaaaggagtaaacgatggcgttcgccataatgatgtcatcactcaaataggtttccccctgcgaggtcaagcgaacggcggtgccgttggtatgatcgccatagtatctgccgttgaatgtggtatacgggctggatcccgcgtagcgcgagaagctgctggcgatggagttatttgccagcaggaaggaaaattcgttaaatccgccgttatcaaatttctgcgttaacgacgtccccgccatccaggtatctttccattcataatatccattattacattcattatatttctcggatgagctctgatttgccgcgacataccggccgctgaccatcaatgacgccttatcccaaagcgggatctctttataacgaatatcaatagtattggtgttaatttgctggcttttggtcaacgtacggttgtagtcatcaacatcctcgcgcaccagcgcgatatcaaatttacccgcgcccactttccagttttcaaggccaacgccggctgcggcatcggttctttgcgttttccagtccagcatctggatttcaattttcggcgcaccgtgcttacccacccagaaatccgcttccggcgcgaatggcaggaaacctttggtgttgacgtacatatcagagaactgcatatagttctcgccgccagcgttatcgccaaaccagccggaggaatactgctgcccgacgttgccgtcaagcatcacgatcgcatcaacccgcttattgccttcctgatagacccgctgcttaagttgtaaatcaaaccagcccgaatattcattaccaaagcgacccagcgagccaatcgcccaggacttaggtgaaccatgggatgcggtcccccagccggaacggtaatagccgttatagctgaagccaatttcatccttcacaaacttgctgaaatccttcattgtcatcgaactataaatggactcgccgttagccgcgggctgttcgtttttcaccagaaccgctgccggttttgcagcgccgccggccggtgcgggtgcgctgacaacctgcgcggacgcactctgctcaggtgcgccaggctgcgtactggcaacccagagtcgatttctggccttctcttcatcttgatatttttttagttcgctctgcgtatccttaagcgccttctccagaagctcaagacgctgttcaacggttagcgattccgccatagcatgggttgtataagcgagcggcgccataataagtatggccgaggtaatcagatttcttttaaacataagttccctttatataaaaacaggtgcaactgaatatcgcgataaaatgtcaactaacgcgaaggcgtatttttatttttctatcgaataaagcttgttaccgaaaaggtgcttccccttaaggaaaaaagaacgttattaaaaccagcactattatttattcggttaataccatcctggtttacccacaaacagccttgcatcaaatcaaaaaaaaacctgaagcaatccccctgcagaaaacagaggaggcttgcttcaggttttgcccgcgcagcggtaacaatccctttcatcggctaatggcggattatctggcaaaaaaaaacctgacatcaccaggttaacggtgatgtcaggttttgcctgcttgcgcagtaacaatccagagttttattcgagccttgccgcaacaagtcacccgattaatgtaccgcattgttacgctattaaaatcaaaccacaattgatgaaattattatttgtgacgacaatcgcaccaattttgttaattaaaaacaggagtaacattaatcataactaattctgataaatcctttatcagaattagtctctgtgatttattactctttaggatctttcccggccagcagtttatccagctcgtcgccgccaacgtgacggaaatcctgacctttgacgaagtagaaaatatattcgcagatgttctgacaacggtcgccgatacgctcaatcgagcgggcgcagaacagggctgtcaggacgcttggaatggtgcgcgaatcttccatcatataggtcatcagctggcgcacgatgccttcatattcctggtcgactttcttatcttcgcgataaatacgcaccgcttcatcaaggtccatacgcgcaaaggcgtccagcacatcatgcagcatctgcacggtgtggcgccccagcgattccaggctcaccagcagcggctgatgctgctgggaaaatttttccagcgcggtacggcagattttatccgcgacgtcgccgatgcgttccagctcggcgatggttttgataatcgccatcaccagacgcaggtcgctggcggtcggctgacgcttggcgatgatgcgcacgcaggcctcatcgatcgccacttccatcatattgacctgcttgtcgccgtcaataacgcgctttgccagttcgctgtcctggttatgcatcgcggtgatcgcatcagaaagctgctgctccaccagcccacccatggtcatgacctgggtgcggatgtactccagttcagcattgaactggccggaaatatgtttgttaagatttaggttatccatagtatctcctgattgcccaataggttagagcctggtagcagaagggcaatcaaccgtagcggccagtaatataatcttcagtttgcttcttagcgggcttggtaaacagatcgtccgtgttgctgaattcaatcagctcgccaagatacataaatgccgtatggtcggagcaacgcgcggcctgctgcatgttgtgggtcacgataacgacggtgtaatcctgtttcagttcagtgatcagctcttcaatacgcccggtagagatcgggtccagcgccgagcagggctcatccagcagcagaacttccggacgaatagcgataccgcgcgcgatgcacagacgctgctgctggccaccggagagagaatatccgctctgatgcagtttatctttggtttcattccacaatgcggctttggtcaatgcccactgcacgcgctcatccatatccgtgcgggaaagcttctcaaacaggcgcacgccaaaggcgatgttgtcataaatcgacatcgggaacggcgtcggcttctggaacaccatccccactttggcgcgcagcagggcgatatcctgggtgttggtcagaatattatcgccatcgagcagaatttcgccttccgcacgctgctccgggtacagctcaaacattttgttgaacgtacgcagcagcgtggatttaccgcagcctgacggtccgataaacgccgtaacctggtttttggtaatatccaggttgatgtttttcagggcatggaattttccgtagtagaaattcaggttacgaactgaaagtttacccggggtcgcattcaccatactcatctcgttcttttcctcattcggcgccgcgtttcgccgcgccgcaaaaattaaccgtgtttattcttcgcgaaaacaacgcgcgccagaatgttcagcagcaatacgcacagggtgataatcaagaccccggcccatgccagttgctgccactccgcaaagggactcatggcaaatttgaaaatcgtcaccggcaggttagcaatcggctgcatcatatcggtgctccagaactggttggagagcgcggtaaacagcagcggcgccgtttccccggcgatacgggcgatggccagcagaataccggtcataatgcccgataccgatgctttcagggtgatcgcagagatcatgcgccacttcggcgtacccaacgcatatgccgcctcacgcaggctgtccggaaccagcttcagcatgttttcagtggtacgaataacgataggtacctgcagcagcgccagcgcaatcacgcccgcccagccggaaaagtgctgcatctgcgcaacgacgatggtgtaaacaaacagaccgacgacaatcgacggcgcggaaagcaggatatcgttaataaaacgaatcacttcggccagcaaggatttacggccatattccgccagataaatccccgccagaatccccagcggggtaccgataaccgtcgaccagaggatcagcaatccgctgcccgccagggcgtttgccagaccaccgcccgccgtatttggcggcggcgtcatttcagtaaacagcgccaggctcatgccgtcgatgccgcgggtgacggtggacatcaggatccagatcagccagaacagaccaaacgccatggtcgccatcgatagcgtcagggcgagacggtttttcatgcggcgttttgcctgcattttgcgacgggattccgccagctccgcggtggtttgtaattcaatcgtcgccattagcgagccccctcattcttagccaggcgcatgatcataaacttcgatgcggccagaacaataaaggtgataacgaacagaatcaggcccagctccatcaatgcggcaacgtgcagtccggtttccgcttcggcaaactcattcgccagcgcggaggtaatgctgttgcccggcatatataacgaagcgctatcaagctggtaggtgttgccgataataaaggtcaccgccatggtttcccccagcgcgcgccccagaccgagcattaccccgccaatcacgccgtttttggtgaaaggcagaacgatacgccagataacttcccacgttgtgcagccgataccgtaggcggactctttcatcatcaccggcgtctgttcaaagacgtcacgcataacggccgcgatgtaaggaatgatcatgatggccagaatcacgcccgccgccagaataccgataccaaatgccgggcccgcaaagagcgcgccaacgaacggaatggtcgacagaacgttgccaaccggctcctgaaaataggtcgcaaacagcggggcgaaaataaacaggccccacatgccgtaaacgatactggggatcgcggccagcagctcaatagcgatacccagcggacgcttcagccaggcgggtgacagttccgtcaggaacagcgcgataccgaagctcaccggtacggcgatcagcagcgcgataaatgaggtgaccagcgtcccgtaaatgggtaccagggcgccgaaaatctggttcggtgcatcccactctttggtccacagaaaggcaaagccaaatttctcaatgcttggccaggacgagatgataagggagacgatgatgccgccaagcatcaatagcacaatcagcgccgccagttttaccagcacgctgaaaattatgtcaccctttttccccggagggttaaatgccggcttggttgcagccataagttactcttcagtttcgggccagaaaaaatcgtagtttactgatctttctggcaaaggtaatgccataccctaaataattcgagctgcaggcaggcagctggcttgtggatccccgggaacatagatgggctatgtgaccggggtgaacaagcgctgccaacgcacctgtagctcgaaggctgacgggtattagtacagcgctttaccgctgctgtcctttacgttggtcttccatgccgcgcgaacttgctcaaccacgctttccggcagggtggcataatccagcgcgttggcttctttaccgccgtttttatacgcccagtcgaagaacttcagcacttcggcggtctgctctggcttgttggaagccttgtgaaccagaatgaacgtggttgaagtgatcggccatgcgttgtcgcctttctgattcgtcagatcctgtgcaaaggatttgctccagtcgatttctttcgccgcgttagcgaagttatcttcagtcgggctcaccggcttgccatcggcggacagcagtttggtgtaagcgaggttgttctgttttgcataggcatattctacgtagccgatagagcccggcagacgctgaacgaacgcggcgatgccgtcgttgcctttaccgcccagaccggtcggccagttaacggttgagcccgcgccgattttagatttccactcttcgttcaccttcgccagatagctggtgaaaacgaaggaagtaccggaaccatcggcacgacgaaccaccgcgatgttctgagaaggcagcttcatgcccgggttgagcttagcaatcgccgcgtcatcccattttttgattttgcccaggtagatatcacccagcgttttaccgtcaagcaccagctcaccggatttcacgccaggcaggttaattgccagcactacgccgccgataacggtcgggaactggaacagaccttcctgagccagcttgtcatcagcaagaggggcatcagaagcaccgaagtctacggtgttggccgtaatttgttttacgccgccagaggagccgataccctggtaattgactttattacccgtttccttgttataggtatctgcccatttggcatacaccggcgcggggaaagttgcacctgcgccagtcaggcttgctgctgcaaaaacagagaaagcgctcatcgataaggtcgcggcgacaactgttgcgacggtggtacgcataacgttcataatgtctcctgctggattcgtaaaccattgtttcgaagctatggtgagcaaaataggacaaacaggtgacagtaaaatgtacgaattattacagttttatgacaagcaaaaagacgggaatttacgttaaataaaaacaatacaaatcatattgttactatggttaatgatagaaagattagcggaaaattttatttttatgacagcgaaaaagcgtctcaaaaatgacaggctgtcataaagcgggtgggatctcgccgttcaccgcaaataaaaagggccgccggacggcagccctttcaacgctgtaaaatcgttattccacggtaacggatttcgccaggttacgcggctggtcaacgtcagtccctttgatcagcgcgacgtgatacgccagcagctgcagcggtacggtatagaaaattggcgcgatcgcctcttcaacatggggcatctcaatgatgtgcatattgtcgctgccggtgaaacccgcatcgccgtcagcaaaaacgtacagctggccgccgcgagcgcgaacctcttcaatgttggatttcaatttttccagcagttcgttgttcggcgcgaccaccaccaccggcatttcagcgtcaatcagcgccagcggaccatgcttcagctcgccggcagcataggcttccgcatgaatataggagatctctttcagcttcagcgccccttccagggcaatgggatactgatcgccgcggccaaggaacagcgcgtggtgtttgtcagagaagttctcagccagcgcctcaatacgcttgtcctgcgaaagcacctgctcaatgcggctcggcagcgcctgcaggccatgcacgatatcatgttcaatcgacgcatcctggcctttgagacgcgccagtttcgccaccagcatcagcagaacggtcagctgcgtcgtgaaggctttagtcgaggcgacgccaatttccgtcccggcgttggtcatcatcgccagatcggactcacgcaccagggatgatccaggcacgttacaaatcgccagcgaccccagatagcccagctctttcgacaggcgcaggccggcgagggtgtccgccgtctcgccggactgagagagggtgatcatcaggctgttgcgacgtacggccgatttgcgatagcggaactcggaggcgatttcaacatcgcacggcacccctgccagcgactcaaaccagtagcgggacaccatacctgagttgtaggaggtgccgcaggcgatgatctgaatatgctcgaccttagacagcagctcgttagcctgcgggcccagctcgcttaaatcaacctcgccgtggctaatgcgcccggagagggtatttttgatggcgttcggctgctcgtagatctctttctgcatatagtgacgatagatacctttatcgcccgcgtcgtactgcagactggattcaatatccgggcgctgcacttcggcgccggatttatcaaagagagtcacggaacggcgggtgacttccgcaatatcgccctcttcgaggaagataaagcggcgggtaaccggcagcagcgccagctgatcggaggcaatgaagttttcccccatccccaggccaatcaccagcgggcttcctgaacgagcggccagcagcgtacccggatcgcgggaatccatgatcacggtaccgtaagcgccgcgcagctgcgggatagtccgcagaaccgcatcacgcagagtaccgccctgttccagctcccagtgaaccaggtgcgcaataacctccgtgtcagtctcggaggcgaaaacgtagcccctcgactgcaacagctcgcgcagcggctcatggttttcgatgatcccgttatgcaccaccacaatatggtcagaaacatgcggatgcgcgttaccttcagacggttcgccgtgcgtcgcccagcgggtatgggcaatcccggtaccgccgtgcaacggatgttcttccagcgcctgggccagcatctgtactttcccgagacggcgaacgcggttcatatgaccttcgttatcgacgacggccagaccggcggagtcataaccgcggtattccagacgacgtaaaccttcgagaaggatttcagcaatatcacgctgcgcgactgcgccaacaattccacacatagtttttaattccgattttggctgtatgccatacgttgtcggtcaacctgtttacccgtattttcgggcgccccgagccttgtagagagtggggttatttttatgggtactgccgtggggggaggattattttatcccctcaccccgctctttcccccgaaaagggcgaaagagaaatagcgttactttttcttcaccgggcgctgccagccctgtttatgaacctgcggcacgcggcttaacactaattcattatcggcaacgttacgcgttaccgttgttcctgcggcaatggtgacccccttgccgacggtcaccggagcgaccagctggctgtctgagccaacaaacacgtcatcgccgatcactgttttatgcttatttgcgccatcatagttacaggtgatggtgcccgcgccgatattcacgttatcacctatctcggcgtctccgagataggagagatgcccggccttcgtgcctttacccagacgcgcctttttaatttcgacaaagttgccgacgtgcgcgccttcgagaagctccgcgccagggcgcaaccgtgcgaacggcccaatggtacaggcggcctcaagatgagcatcctctaccacggtataggggctgatctcgcaatcatcaccaatggtgctgttcttgatgacgcagccggtgccaatctttacccgatcccccagtaccacgtcaccttcgaagataacgttagtatcaatttcgacatcgcgcccgtgtttcagcacgccgcgcagatcaaaacgcgccggatcgcgcagcataacgcccgcgagcagcagttcttcagccttttcagactgccagacgcgctcaagacgagagagctgcaggcggttattcacgccttccacttcgcttagacgctgaggatgaacagcggcaatttcacgaccttcttcataggccatggcgataatatcggtgatgtagtattcaccctgaacgttgttgttggtgagcttagccagccagcgtttaagatccgcgccattggcgaccagaatcccggtattaatttcctgaatccggcgctgctcgtcgctggcgtctttatgctcgacaatgcccgtcaccgctccgttatcgcgcgtaatgcggccgtagccggtcggatcgtcaagcttcaccgtcaacagaccgatgccgccctgcggtttcgcttcccgcagacgcttcaatgtttcgacggaaatgagcggcacgtcgccgtacagcatcaggatatcttcatcatcgctgaagaagggcgccgcctgctgcatggcgtggccggtacctagctgttcggcctgcaggacccagttgaggttgtcttcgtgcagcgtctggcgaagcagatcgccgccgtgtccatacaccagatgtacggcggaagcgcctaattctttagctgcatcaataacatgctgcaccattggcttcccggccagcgaatgcaacaccttaggaagatcggaatacatgcgggtacctttgccagcggcaagaataaccacgctcatcggactgtttgacatacgcatcctgactgctgttggaacgaaaagtaaaagcctttcacgttgaaatatctacatatttttcatcatgaaacgagacgaagataaaacgcacaagcgtaacgctatacaccattttaggtgggtatttttagtcagcgcaaacccgtttagcgcaaaaaaagcattttaatgagtggcaatgccggctatccctctgcttttgctgtttttttggcgggtaaataaagaaaagtcataaaataaaacacagttttaatattcattaattgtgacgtgataaatagaaacgccatttcattttcctgataatgccggttaataattacccaggagaaaagaatgaataacaaaatacctttggcattaaccctttgcagtacgatgatcgcgctaccgctgcaggccaacgaaggtcatcagtggcgggcaatcgcctttgggcaatctaccgacagcaatttttcctcgaatgttctgccggaaaaaattggcgtcaacgatgtcaccatcgccggaaaaaaactgacgccgcaggacgtcgccgacctcagccagcccattaccatcgagagccggggaggtaaaatagccaattctcacgacggactgaccttcttttacacccggctaccgaccagccagaattttatcctgcaggctacggtgaccgtcaatcagtttggcccggaaaatggcgcgcgtcctgcggcacaggaaggagcaggactactggtgcgcgatgtaataggagttccgcgtcaacagccgctgaaggtcggttacgaagagtttccggcggcatccaatatggtgatgaacgccattatgacgcaggataaaaaagatggctcacatatcaaattgcaggctatcagccgggaagggataacccaaccgtggggcaatgcgggcgcatcaataaagcgtcagagctataaagagaaaatcgatatccagcaaacgccgacgttccagctcagactggaacgcaccaacgacgggtttattacctcatgggcagcaacgggcagcgaggaatgggtgagccagcaggttccgcacgccgatctggttgcccggcaggataaagaacattactacgtcggcttcttcgcctcacgtaatgcaaaaatcaccgtcagcaacgcctcgctcaccacctcagcggcacatacggttccctccgcgccgtatgtcgctaaaggctggccgccggttatgcaaattgcttcgggaacagtaagccagagcaaagcttacatcctacaggcgcgcaccaacagcgatgggcgcatcaccgttcgtcaggatgaagtggtgatcgggcaggataaaaccgtgaaggccggggaaatgtttacccagcctgccgtactgaaagataaaagcacgttcgaaatccgcttcaccccggccaccggcgctgaaacgctgacccagacgctgacggttgaacagagtccccatgtgacaggcaatacgctctacgccgcgccagagggacaacctcaggcaaaagggacggcggactcgccgctggatttcgcctccgctatcaaactcgtcccgcccggcgggcaaattgtattagccgccggagattacccgcaaacgaccattcctgtcagcgccagcggcctgaaggacaaaatcaaaacgctaaaagccgacggaaaagcggtgattcacgggctgctgctggatgccagctactggcatatcgatgggattgagattacggacaagagcctgcgcgtacagggcagccataacctgatcgagaacgtcaccgcgtatcgtaacgatgataccggcattcaaatttcctctccggcggatgttggacgcccgctgtgggccagctttaaccgggtagtgaattctgaatcctttagtaacgaggatccgggcaaaattaacgccgacggcttcgcggtgaaaatgcgcgtaggagagggtaaccggctggagggctgttactcgcacgataatatcgacgacggtttcgacctgtttaataaaattgaggacggtgcaaacggcgttgtggcgatcgagaactctattgcccgcaataataccagtaacgggtttaagctcggtggggaagggcagccggtcgcccacgaggtacgtaacagcatcgccatcgataaccatctggacggttttaccgacaactttaaccccggcaagctggtggtggttaacaacgtcgcggtagataaccagcgctttaactacctgttccgcccgagtccgtacggtgcgccggaaacgcagggcaccttcagcgagaacctttccctgcgcagccagcctgggaaatatgacgatgccgttgtcgggaatgttgacgatagcaactattttatccacggcggcagaagcatcaacgctcagggcaagcgcattaacagcgccgattatcagacgctggcgctgccggacccactgacgcgtgaggccgacggcagcttcaacaccggtaacttcctcagccgcaactaacccgctatacgtgaaaaacataaaggtcgccctggggcgaccttttcactttctgtctgtttcacaccgcatgtgttgtcgttttagttagcggtacagcgcaaaaacagtctggaaagttgacttcttagtggttgaacgtaccgaaggttacgttcatagcactgaagaaagcgacgattttattaagcagtttcatgatctcttcctggatagcgattacgtttttgatgaatttttttgtgactcacatcacaaaaacaagtctacgcttcatcttttaaacgatcaacaaaaatgagacacgcatcacaaatttttaaacccgctttttagttttgctttttctgaaacgaagccataaaaaaagccagcctggaaaccagactggcttttagcgttcaagccggtgttacatcgcttttttggtcaactcgataacgcgcagtttagcgatcgctttggccagttccgcagacgcctgagcgtagtccacgtcaccatgagagctcttaatgtgctcttcagccttacgtttcgcttccagggctcgcgcttcgtcgagatcctggccacgaattgccgtatcagccagaacggtcgtgctacccggctgcacttcaagaatgccgcctgacaggtagataaattcttcgtgaccgtgctgcttaacgatgcgaatcataccaggcttaatggcggtgagcagcggcgcgtgccccgggtaaatacccagttcaccttcgctacccgttacctggattttctcgaccagaccagagaacatttgtttctctgcgctgacgacgtccaggtggtaagtcattgccatatcaccctccgattaaggcgttaaagttttttggctttttccacggcttcgtcgatagaaccgaccatgtagaacgcctgctccggcaggtgatcgtattcgccttccatgatgcctttaaagccacggatggtgtctttcagggagacgtatttgcccggagaaccggtaaatacttctgccacgaagaacggctgggacaggaagcgctgaatcttacgcgcgcgagctaccaccagtttatcttcttcagacagttcatccatacccaggatggcgatgatgtctttcagttcctgataacgctgcaggatggactgaacgccacgagcggtgtcgtagtgctcctgaccaacaaccagcggatccagctgacggctggtggagtccagcgggtcaactgccggatagatacccagagaagcgatctgacggctcagtaccacggttgcgtcaaggtgcgcaaaggtggtggctggagacgggtcagtcaagtcatccgcgggtacgtataccgcctgtacggaagtgatagagccggttttggtggaggtgatacgttcctgcagaacgcccatctcttccgccagagtcggctggtaacctaccgctgaaggcatacggcccagcagtgcggatacttcagtaccggccagggtgtaacgatagatgttatcgacgaacagcagaacgtcacgaccttcgtcacggaacttctcagccatggtcaggccggtcagcgcaacgcgcagacggtttcccggcggctcgttcatctggccatacaccagggatactttatcgataacgttggagtcggtcatttcgtggtagaagtcgttaccctcacgagtacgttcacctacgcccgcaaacacggagtaaccggagtgctcgatcgcgatgttacggatcagctccatcatgtttacggttttacctacacccgcaccaccgaacagaccaactttaccgcccttcgcaaacggacacatcaggtcgataactttgatgccggtttccagcagttcctgagagtttgacaactcttcgtaggaaggtgctgcgcggtggatagcccaacgctcttcttcaccgatgtcgcctttcatgtctaccggttggcccagtacgttcatgatacgacccagcgttgctttacctaccgggacttcgatcggatgctcgaggtcttttacttccagaccgcgacgcagaccgtcggaagaacccatggcgatggtacgaacaataccgccgccgagctgctgctgaacttccagcaccagattctcactaccattttgtacctcaagagcctcgtacacgcgcggtacggcatcctgagggaattcgacgtcgaccacggcgccgattacctggacaatttttccagtagccatcttgaatcctctacgaattaacctggttataccgcggatgctccaccgacgatctcggtgagttcctgagtaatgctggcctgacgagctttgttgtataccaactgcagctctttaatcaggctgccgccattgtcggtcgcggctttcatcgccaccatacgtgcggcctgctcgctggccaggttttctaccacgccctgataaacctgagattccacataacggcgcagcagggtatccagcagcgctttcggatcgggttcatacaggtaatcccaggatttacgcttcaactcaccatcttctgaagccggtaacggcagcagctgagtgatggttggaacctgagacatggtgttaataaatttgttgctgacaatatacagcttgtccagacggccttcatcgtaggcctgcaacatcacttttaccggaccaatcagttcggacagggatgggttatcccccatacccgtcacctgggcgacgacattaccgctaacggaattaaagaacgacacgcccttggagccgatcattgcgagttcgcactgaacgcctttatcggaccatgctttcatttccgccagcagctttttgaacaggttaatgttcaagccaccgcacagaccacggtcggtagacaccaccaggtagcccacgcgtttaacgtcgcgttcttccaggtaagggtgcttatattccagattaccgttcgcaaggtgaccgatcactttgcgcatcgtatctgcataaggacggctggccgccatacgctcctgcgatttacgcattttggaagcggcgaccatttccatcgctttagtgatcttttgcgtgttctggacgcttgcgatcttactacgtatctcttttgcgccggccatgagcttctcctcaatgccttgcggcctgccctagagcaagccgccagactttaccaggattgggttgctttgaaggaatcgaggatgcctttcagcttgccttcgatttcgtcgttatagccaccggactggttgatctcttgcatcaacggagcgtgatcacggtcgacgtaagccagcagagcggcttcaaagctaccgattttcgacagctcgacatccgccagataaccacgttctgccgcgaacagaaccagagactgctgcgcaacggacatcggcgcatactgtttctgtttcagcagttcggtcactttctgaccgtggtccagctgcttacgggttgcatcatcaaggtcagaggcaaactgggagaacgccgccagttcgcgatactgtgccagagcggtacgaataccaccggacagtttcttcatgatcttggtctgagctgcaccaccaacacgggatacggagatacccgggttaaccgcaggacgaataccggagttaaacaggttggtttccaggaagatctgaccatcggtaatggaaattacgttggtcggaacgaacgcagaaacgtcacccgcctgggtttcgataatcggcagcgcagtcagagaaccggttttacccttcacttcacctttggtgaaagcttcaacgtattcgacgttaacacgtgcagcacgctccagcagacgagagtggaggtagaatacgtcgcccgggaatgcttcacgtccaggcggacggcggagcagcagggagatctgacgataagcaacggcctgtttagacaggtcatcataaatgatcagcgcatcttcaccgcggtcgcggaagtattcacccattgcacaaccggcgtacggcgccaggtattgcagtgcggcagattcagatgcggttgcaaccacaacgatggtgttagccagcgcgccgtgttcttccagtttacgtaccacgttagaaatcgtggacgctttctggccgatggctacgtagacgcacttgatgccggaatcacgttggttgatgatggcgtcaatagccagcgcggttttaccggtctgacggtcgccgatgatcagttcacgctgtccacgaccgattgggatcatggcatcaacggatttataaccggtctgcaccggctgatcgacggactgacgttcgattacgcccggcgcgatagcttcaacggcggagaagccgtcgtgctccagcggacctttaccatcaatcggtgcacccagggtgttaaccacacgtcccagcaggccgcggccaaccggaacttcaaggatacggccagtacatttaaccttcataccttcggcgaggtcagcgtacggacccatcacaactgcacctacggagtcgcgctccaggttcagtgcgatagcgtaacggttacccggcagagcgatcatctcaccctgcatacaatcggccaggccgtgaatgcggataacaccgtcacttacagaaacgatagtaccttcgttatgagcctcgctcacaacattgaactgagcaatgcgctgcttgatcagttcgctgatttcggtggaattcagttgcatgctccagtccccttaagactgcaagacgtctgcaaggcgttcaagacggccgcgtacgctaccatcaatgaccatatcacccgaacggatgattacgcctgccattacagacttatcgattttgcaattcagcttaactttgcgtgacagacgtttttccatcgcggcggtaattttcgcaagctgttcgtcactcatttgagcggcagaaataacttctacctctgcggttgcctcactggcagcgcgcaggtgaatgaactgctcgagaacatcagggagcgctttcagacgaccattttcagccatcacccggatcaggttttgaccattttcgtccagttgctcaccacaaaccgcgataaacacatcagagagcgtttccggcgccagtgcgccagagagtagctctgccatttcttcgtttttagtcacttcagcaacaaacgccagcatatcctgccagcgttcaacgctgttgtgttcgacggcaaagtcaaaagctgctttggcgtaggggcgagctaccgttacaaattcagacatcagcccctccctccttacagttcagcgacaagtttatccacgatgtcgctgttagcagcttcatccacggaacgttcgatgatcttctcggcgccagcaacagccaggatagcaacctgcttacgcagctcctcacgggcacgtttacgttcggcatcgatttcagcctgcgcctgtgcgacgattttggtgcgttcctgttctgcttccgcttttgcttcatccaggatctgagagcgacgcttgttcgcctgctcgatgattacctgggcttccgctttcgctttttcagctggtcggtcgcgttggcctgtgcaaggtccaaatctttcttagcgcgttctgcagaagctaaaccgtcagaaatttctttctggcgcttttcgatggcagccattaaaggcggccatacatacttcatgcagaaccatacgaagataacaaacgcgatggcctggccgaggattgttgcgttcatgttcacagcacaatacctcttaaaaaataactctgtggcttaggtttctttcgaacaacttactacgcgacggcgaacatcacgtacagacccagacctacagcgatcatcgggatagcatccaccagacccataacgataaagaactgagtacgcagcagaggaatcagatccggttgacgcgctgcgccttccaggaatttacccccgaggatgccgataccgatcgcagcaccgattgccgccagacccatcatcacagcggcagccatgtacagcagatccatattcaggttttccatgacagtctccagtttgtttcagttaaaacgtagtatgttggtaaaaatcaatgctcttcagatgccatcgacagatagacgatcgtcagaaccatgaagatgaaggcttgcagcgtaataatcaggatgtggaaaatggcccatggcacattcagaatccactgtgaccaccacggcaacaggccagcaatcagaatgaaaatcagctcaccggcatacatgttgccgaacagtcgcagacccagtgatacaggttttgacagcaggcttaccccttcaaggattaagttgacaggaatgaacgcccagtgattgaacggctgcagggtcagttctttaacgaacccgcccacgcctttcattttgatgctgtagaaaagaatcaggataaatacgccaagcgccatcgacagagtgatgttaacgtcagctgacggcaccacgcgcagagcaggcagaccgagaacgtgttcgccgatccaagggataaagtcgataggcagcagatccatcaggttcatcaggaatacccagacgaacacggtgagggccagcggagcaatgaccttgctcttgccgtgatacatatctttgacgctgccatggacgaagccgatgatcatctcaatgaaggtctggaatttaccaggtacgccggttgtcgcctttttagccacgctgcggaacataaacaggaataacagaccgagcaccactgagaaaaacatggagtcaatgttgagcgtccagaaggtggccggggggttgtgcggatccaccagcgagaatgtacgcaggtccagctgaaggttgttcagatggtggcctatgtaatcctgcggcgtcatattttctgaagccatgatgccttttaccctttgttgttaattacagctggcgccagaacttgtaccaccagcaccaaaacccacgtcactatcagcggcaaaaataccactttcaaaaccgccagcgccaccgccagaaaggcgaaggtcagcaacaccttgaaggcttcaccaatggcgaaggaccaggccactcggcctttagctggtgtatgcgcctgatgacgccaggcaaaaatcataaatatcatgtttggcaaaagaaccgccaaacctccactcaccgcggagatgccccagaaagggtctttgaggctgaacagcagtccacttgctattactgccagtaactgaataaacagaagcttacgagcaacgtttcgactcaagagcgacactgacatcacgtttttactcctgctcccttcgaggtatgtcgcgtgtcgtataaaacgtcctttaagacgaagagtcaagcatcaaaaagcggacaaattatacggtgacgcctcgtgatttcaaacaataagtagcaaaatagtgaataaatgtttaattattttccgacagacaacttttcatgcatttcaccgatctgtgagccgtcatgcaaaactgcaaataccgcgaaaaatcggcaattaaagcgtgcatcagatcacataataaacatttttcgcgaaatcgaattaattctgtacataaaactcaattttttatccgtttgatattcaacataaaaaccaggtattctttctaaaacaatcccatatacaataaaaaccttttattgacattcataataaaaatttaacatcagtatgaagtgcaagcagcgagatttttagcgtactgatattttcaatgttgactattctgttggtaaagcaacagggccaagttaacggaaagaaaacccctggtaaccccagggttaaagacagtccgataataccctgccgtgacttttatttttgtaacatccacggaccgtgtttttttcacattttttgataaaaattaaatcatttttggctgaatcaccacaaggtgacgctccccttccagctgaggcacatgcagttcgacaacttccttaatgacgaccccttccggcagatttgccatttcatcttcctgcgctaagcccttgagcgcataaaagtgaccgttctctgcaggtaaatgatggcaccagctcaccatgtcattcagcgacgcaaatgcgcggctaatcacgccgtcaaacggcggctctgccgggaactcttccacacggctttgtaccggggtgacgttatccagtttgagctcatgctggacttgccgaaggaaacgtactcgcttgcccagactgtccagcagggtgaagtgggattcaggacgcacgatagccagcgggatccccggcagcccaggccccgtaccgacatcgataaaacgcgttcctttaaggtatggcgcaacaacaatgctgtcgaggatgtggcgtaccagcatctcgtcaggatcgcgaaccgaggtcaggttataggccttattccacttatccagcatgccaacgtaggcgacaagctggtttttctggtgatcggtaagtgaaatacctgcttcatcaagcagacgagaaagtttgttgagcacgatcgttacctgtttaaaaacaatgagcccggaggcgatacgcttaccgggctgagaaattgacctgacggatatctgatgcgctattcgcccatgtatcgttcagtggaatatcaggcgctacggcgcagcattccctgcttttttaaccacaccagcaaaatcgagattgccgcaggcgtaatgccggaaatacgcgatgcctgccctatcgaagacggcttatggtcgttcaacttggcaatgacctcgttcgacagcccattcacctggcgataatcaagcgtagcaggcagcaacgtgttctcgttgcgctgttgtttctcgatttcatcctgctggcgcgcgatgtagccttcgtattttacctgaatttcgacctgttcagccgcttgcttgtcctcaagacccggcgagaacggcgtcatctgcaccagctgttcgtaggtcatttccggacgacggagcaaatcttcaccgttagcttcacgggacaaaggcgccgtcagtcgagcattcacttccgcagcgctttccgccagcggattaacccagctggttttcagacgctgacgttcacgttcaatgctctcaagcttctcgttgaaacgcgcccagcgttcgtcatccaccagacccagttcacgaccttgttcggtcaggcgcagatcggcgttgtcttcacgcagcatcaggcggtattccgcacgagaggtaaacatgcggtacggttctttggtaccgagagtacacagatcgtccaccaggacgccaaggtaagcctgagagcggccaggcgcccacccctctttctcggcggagaaacgagcggcgttcaggcctgccagcaggccctgagcggcggcttcttcataaccggtggtgccgttaatctggccggcaaagaacagaccatgaataaatttgctttccagcgtcggtttcaggtcgcgcgggtcaaagaaatcgtactcaatagcgtagccagggcgaacgatttttgcattttccatcccctgcattgagcggacgatttgcatctggacatcgaacggcaggctggtggagatgccatttggataaatttcgttggacgtcaggccttccggttcaaggaaaatttgatgctggttacgatcggcaaagcgcatgaccttgtcttcgatcgaaggacagtagcggggaccgatcccttcaatcacgccggcatacatcgggctgcgatcgaggttattacggatcacgtcatgcgttttctcgttggtatgcgtgacgtagcacggcacctgacgcggatgctgcgaagcatctcccataaacgagaagaccggcatcggattatcgccgtgctgctgtgccagaacgctgaaatcaatcgtcctcgcgtcgatacgcggcggggtaccggttttcaggcggctgacgcgcagcggcagttcacgcaagcggcgggacagcgggatcgacggaggatcgcctgcacgaccgccgctgtagttatccagaccgatatggatcttaccgtcgagaaaggttccgacggtcagtaccaccgctttggcgcggaatttaagccccatctgggtgacggcgccaacaacacgatcgttttcgacaatcagatcttccaccgcctgctggaagatcattaaattaggctggttttccagcgcggtacgtacggcctgccggtacagcacacggtcagcctgagcgcgagtcgcccgtacggcagggcctttgctggcgtttagtatcctaaactggatgccggcgtggtcaattgccttcgccatcaggccgccaagcgcatccacttcttttaccaggtgtcctttcccaatgccgccaatcgccgggttgcagctcatctgccccagcgtgtcgatattgtgtgtcaaaagcagagtctgttgacccattcgcgctgcggccatcgcggcctcagtgcctgcatgacccccgccaatgatgatgacgtcaaaaggatcctgataaaacatggtggtatgcctcgcataaagcggtttgaaaatagagtgaagcccgggccgtggattctactcaactttagcctttcgagaaagcgccgggatcctgagtattaaaaagaagatcttttatttagagatctgttttattgtgatctcttattaggatcggcttgtcttgtggataagtcagatccgcgatttaagatcaaacgcttaagaaggatcgctttctgtgaatgatcggtgatcctggtccgtataagctgggatcaaaatgaagggttatacacagcacaaaaatcagtcaagggttatactttggataactaccggttgatccaagcttttaagcatagttatccacagaagaaagtatgatctttacaattctcagagcaagtttttccaggatcccagccaaatctcggccggatcttccggaatttcatgttcgagaacgttaatttttagcgtttcaccgatctgttttgccccgcaggcgttgagcgccgtctcgagcttatcaattgctccgcagaaggtatcgtattcacggctaccgatgccgactgcgccaaaacggaccgcagagaggtcgacctgcttctcctgaagcgcttcatagaaaggcagaagattatcgggaatgtccccggcgccatgcgtcgaagagataaccagccagatcccttccgcctgcagatcgtcgatcagcgggccgtgctgaatagtcgtgctgtgcccagcctcttccagcttttccgccagatgttctgatacatattctgcgctacccagcgtactaccgctgataagagttatctctgccatgatcgcccgctccactattcagagtggcgtattgtacgctgtgagcgagctgggatctacctgtggaaaaatgtgggattaaaaagctcgatcacgggcggatggtacgcataatcgggttttgcaggacgatcagcgtttcagtggactgaatttcatcaattgtttggatcttgttgataagtacatgctggagcgcatcaatcgatcggcacatcacctttataaagatgctgtagtgtccggtggtgtaataggcttcagtaacctcatccaggctgtttagcctggccagcgcggaggggtagtctttcgcgctcttcagaatgatgccgataaaacatcccacatcgtaacccagctgcttggggctgacgtcgatgcgtgcgccggtaataattccggcctgcttcattttctctacccgcacgtgaatggtccccgggctgacgccaaactgttttgccagttcagcataggcggtgcgcgcgttggccattaaggcctcaagaatgccgcggtccagattgtcgatctgataattttccataggtttttcttatgaagtttgacgaatatttctattttagcctcaaattttaatgaatcaaaatcgatgcaggctttttgttgttggattattgaattgcagcgctgttttgttgcttaatcaatggcaacaggacgcaggagttataaaaaatgaaaaccgcatacatcgcaaaacaacgccagattagtttcgttaagtcacatttttcccgccagcttgaagagaagctcggcctgatcgaagtccaggcgccgatcttaagccgcgtgggcgatgggacccaggataacctctctggttgcgaaaaagcggttcaggttaaagtgaaaacactgccagacgcccagttcgaagtggttcattcactggcgaagtggaagcgtcaaaccttgggacaacacgacttcaacgcgggcgaagggctgtacacgcacatgaaggcccttcgccccgatgaagaccgattaactcccatccattccgtttacgttgaccagtgggactgggagcgcgtaatgggtgatggagagcgccactgcggcacgctgaaagcaaccgttgaagcgatctatgccgggatcaaagcgaccgaagacgccgtcagtaaagaatttggcctcacgcctttcttgccggagacgatccagtttgttcacagccaggagcttttaagccgctatccggatcttgatgccaagggccgcgagcgggcgatcgcgaaagagctgggcgcggtattcctgatcggtatcggcggcaagctttccgatggccagcgtcacgacgttcgcgcgccggattacgatgactggagcacgcctgccgctgaaggctatgccggtctgaacggtgatattctggtgtggaacccggtgcttgaagatgcattcgagctctcttcaatggggatccgcgtggatgccgacgcgctgaagcgtcagctcgcgatgaccggcgacgaagatcgcctgcagctggaatggcaccaggcgctgctgcgcggagagatgccgcagacgattggcggcggcattggccagtctcgcctgacgatgctgctgctgcagcttgagcatatcggccaggtgcagtgcggcgtgtggccaacccaggttcgtcaaagcgttgctgcgcttctttaatcagtgattaacgccgccagcgtctcagcaggcggctacgcaacccggtatcaaagcgccagatatgatcgaatacgcgcataatgccgggcttgccgtgtaccgacatcgccaccgcatgaaaacgatgttgatgtttatgctgtagctctcccaccttattgatcacctcatccggcaagcgctgggcgataaaatcagaaatcaccaccgcatccgcatcgacccactgcggattctgcatacgctcaatcaccgcccggaagcagctggccagatcggtgccgccgcgaaagcgctggctcaagaaacgaatcgcctgttccagcccctgcgggccggtgagttcgtagtgcaccacttcgctggaaaacagcataatgaagcagcggcggttatccgccagagcgacccgcatcagcgccagacaaaacgccttggcgcactgttcattgaaaccgcccattgagccggaagtatcgacgcagacgataaacggcccgcgcggctgttcatcaacgtcctggcgcgttaccggccgttcggtgatcttttccttccacgcatcgccgtgtagtcgataggtcagcagctgcttttcaaccagcttgcggtagaactcaaactccagctcggtgatgccgagggtagccagctcaggcggcagcagacgtagaatatcgtcgctctgctgaagaccgtcgacctgctccggtacggtagccggttcgcgcaccaggctgcggaaggtctccatcggcgcatcttttttcggcaccgctttcgcttcacgcgagcgccccagctgttcggcgagctgcatgagttcaggttgttggcttaaaaagtccccgtagcgaacgatcagctggtaatcgcctcgcttcagctctccggcgctcatgtcccacaggtgtcccgccgcattatcattttccaccagcacgggctcgagctggccgctgagggtcatgcgctcctgaacttcgctcagcagctgatcgcgctcttcatccagcagctgctgattaagagaggttgcctgcaccaccaggctcagacgccagcgctgaaggaataacgtgtgcagcgccggcgtaaaggtgctgttgttgtccaccagctgctgcgcctggctggcaaaaggggagtgcagcttatgcagctggctcagaatttgcggcagctggacgataaactgcgaggtggaaagccgctgtgattgctgatagcactgaacttccgcatccagctcgggcgggacgttggtctcttttagtcgcgatctgaccgcttcccgccagcgaggaatgtcggcggcgataatatttttgagccgcggaaatttttcaaagaataccgcgagttgaggcgctgccagcagggccagcagcatctcatcgatcatgccctcttcgccgactgccagcatgacattcagtatgtccagcgtcatgactggcgggcctgtttaatctgcgttcccacgtcctgcaggctggcttcaatgcgccccagccactcgccgggaataaacagacatttctgctgttcgctgaagcggttatgttgctgatgccattcgtcgtccagcgcctccagctgttgcctgatttctgccggcatattttcccgtgattcgctaccgggcagggagagtcgcgacccctgcaggctcacatcgcgcacgaccagatgctggctggtatcgacatccatattcagctgctgggcaaaaccaatgccgttgagcttgccgcggatctcaccccctttctccagccagtgagcaagctcttcacgaacaaacgtaatatgaatcacttccaggtcgtgcagttttagcggctgctggagaagcagcgttagcgtggggtcctgcacttcagcaggcagttcataatgaggtttacggctgaacatcccgccgagacgggtgacttttagcgcggtcttatcgctttgctgctgttgaagctgaatgcgccgttgaataatcgacccgaggcgggtgagcatcgcctgctgctgccaggcgtggctggtcattaaggtctcaatctgcacggacatcagattcatcgtctcaatattgtgccacaggcaatccttcagcaggatcaggtctattggcgcaatggtgtcgcggccgctgaaaaaggcgctggcctgcagcagacgaatggcttttttccagcgacgatctgagacgtaaggcgcgtttggcaacgtatccagctgctggcgcagctggaaaatcagttcaaatacgctgtccggtagcttcacgctgccgatatcctgctgccattgcagaaattcctcgtcgctgacctgcaaactcgccgggacaggattactgttctcgtcctgctggcttatcagcattgagcggaagttcgttttatcctgtaccttatccagccataggcgaataagcatacgatcgtataaggcttccagactgttgtctgcctccgggagctcgttcgacgccgccaccagcaggcgcatggggatcttctcttcggtcgccccgttgcggaaatggcgttcgtttatcgccgtcagcagcgtattgagaatcgccgggcccgctttccagatctcatcgagaaaaacaatttcagcttccggaagatagccggcggtcaaacgttcgtagcgcccttcatctttcagcgcctgaatggagagtgggccaaagacctcttccggcgtggagaaacgagtcatcaggtattcaaatgcgcgagcctgctggaaggcgaacttgaggcgacgggcaatcaggcttttggcgatccccggcgggcccagcagaaaaacgctctcgccgctgagggcggcaagcaggcaaaggcgtattgcgtggctgcgttcgaagagtcctttttccagcgcggcgctgagccgggaaattctttctgccagtaaatgtgattgagccataatagagttgcgtgctttttagaatgtcgttgttaggtcgagtatagatgtttgattaggggtggtaatagcctgaagaatcgatttattttctttgagtcaggttaagatgatgtcagttaggggtacgattcagcaaataatcgtgcatactgtgcgctttttgtgggccaagggactaggcacacatttgttttataaacgaaaagactagtctatgagcactgataataagcaatcgctgccggcaataacgctggcggcaatcggcgtggtatacggcgatatcggcaccagtccactgtatacacttcgtgaatgtctgtcaggtcagtttggctttggcgttgagcgtgatgctgtttttggcttcctgtcgctcattttttggctattaattcttaccgtttcactcaaatacatcaccttcgtgatgcgggcagataacgccggtgaaggcgggatcctgacgttaatgtcgctggcggggcgaaacacctccgcgcgcgccacgtccatcctggtgatccttgggcttatcggcggcagcttcttttatggcgaggtggtcattacccctgccatctcggtgatgtcggcgatagaaggtctggaaattatcgctccggacctggatacctgggttgtgcccatatccatcattgtcctgacgctgctatttgccattcaaaagcacggtaccagcatggtgggtaagctgttcgcgccgattatgctgatctggttcctgctgctggcggtactgggcgcgcgcagtattttcgctaaccctgaagtgctgcaggcgttgaacccttactgggcggttcatttcttcctcgaatataaaaccgtctcgtttgtggcgctgggggcggtggtgctgtcgattaccggcgtggaagcgctgtatgccgacatggggcatttcggcaaattgccgattcgcctggcctggttttcggtcgtgctgccttcgctggtactgaactactttggtcagggggcgctgctgcttaaacatccggaagcgattaaaaacccgttctttctgctggcgccggagtgggcgctgatcccaatgctgatcattgccgccctggcgacggttatcgcttcccaggcggttatctccggcgtcttctctctgactcgccaggccgtgcgtctggggtacctgtcgccgatgcgtattattcacacctcggaaatggagtccgggcagatttacatcccgtttatcaactggctgctctatatctcggtggtcatcgttattgttaattttgagcactcctcgaatctggcggcggcatacggtattgcggtgacgggaacgatggtgctgaccaccattctgttcacgacggtggcgcggcaaaactggcactggaataagtttattgtggcgctgctgctggttgcctttatgtgcattgatatcccgctcttctccgcgaacctcgataaaatcgtctccggcggctggctgcctctgaccctcggtctggtgatgtttaccatcatgaccacctggaaaagcgagcgtttccgccttctgcgtcggatgcatgagcacggtaattctctggaggcgatgatctcttctcttgaaaaatcgccgccggttcgcgtgccgggtaccgctgtttatatgtcccgtgcgctgaacgtgattcctttcgcgctgttgcacaacctgaagcataacaaggtgctgcacgagcgggttattttgctcacgctgcgtaccgaagacgcgccgtacgtacataacgttcgtcgcgtgcagattgaacagatatcgccgtcgttctggcgcgtcgttgccagctacggctggcgcgaaacgccgaacgtcgaagaggttttccaccgctgcgggctggaaggcctgagctgccggatgatggagacctccttctttatgtcgcatgagtcgttgatcatcggcaagcggccgtggtatctgcgcctgcgcggcaagctgtatctgctgctgcagcgcaacgccctgcgggcgccggaccagttcgaaatcccgcctaaccgggttattgagctcggcacccaggttgagatctgattcgctaaggcccttcttgatgaagggcttttttgttttatctgctcgcttcagacttatctcgctgctgcgttgcgaaacgtttcgatgatgatcacaattctcacatctggtgatggttttctgttctcttattgctaatacttataccagcgaaacgtttcgctaatggagcaaaagagaaaatgaaaaaaggtaccgtcctcaatgctgatatctcgtcggtcatctcccgtctggggcataccgatacgctggttgtttgcgacgctggtttaccggttccccgcagcagcacgcgtattgatatggcgttaacccacggggttccctcctttatgcaggttctggaggtggtgacgagcgaaatgcaggttgaagcggctatcctggcggaagagattaaaacccttaatccgcagctccatgcgacgttgctcactcaccttgagcagctgcagcagcaccagggaaacaccattgaaattcgttacaccagtcatgagcagtttaaaaaagaaaccgcagacagtcaggcggtgattcgcagcggggagtgttccccgtatgcgaacgttattctctgtgccggcgtgacgttctgaggtcgccgatatggaagccttattgcaactaaaagggatcgataaagcgttccctggcgtcaaggcgctctccggcgcctcgctaaatgtctatccaggccgcgtgatggcgctggtcggggagaacggtgccggcaagtccaccatgatgaaggtgctgaccggtatctactcccgcgatgccggttcgctgctgtggttggggaaagataccaccttcaacggacctaaatcttctcaggaagccggaatcggcatcattcaccaggaactcaacctgatcccccagctgacgatcgccgagaatattttcctcggtcgtgagtttgtgaatcgctttggcaaaattgactggaaaacgatgtatgccgaagctgacaagctattggcaaagctgaacttacgcttcaacagccaaaagctggtgggcgatttgtcgatcggcgatcagcagatggtcgagatcgctaaggtgctgagctttgagtcgaaggtcatcattatggatgaacccaccgacgcgctaaccgacaccgagaccgaatccctgttccgcgtgatccgcgaactgaaatcgcaggggcgcggtattgtctatatctctcaccgtatgaaagagatcttcgagatttgcgatgacgtcacggtcttccgcgatgggcagtttatcgccgagcgcgaagtggccagcctggatgaagatctgctgattgagatgatggttggccgcaagctggaggatcagtatccgcatctggacaaagccccgggcgcggttcgccttaaggtcgacaacctgtgcggctcaggggtggagaacatctcctttattctgcgccagggcgaaatcctcggcgttgccgggctgatgggcgccggacgaaccgaactgatgaaggtgctctacggtgcgctgccgcgcagcagcgggtcggttaccctggatgggcatgaggtcattacgcgttctccgcaagatggcctggccaacggcattgtttatatctccgaagaccgcaagcgcgatggtttagtgctcggtatgtcggttaaagagaatatgtcgctcaccgcgctgcgttacttcagtcgcggcggcggtagcctgaagcataaagatgaacagcaggcggtaggcgattttatccgcctgtttaatgtgaaaacgccgtcgatggagcaggctattgggctgctatcgggcggtaaccagcagaaggtggcgattgcccgcggcttgatgacccgtccgaaggtgctgatccttgatgaaccgacccgcggcgtcgacgtcggggcgaagaaagagatctaccagctgattaaccagtttaaagccgaaggcctgagcatcattctggtctcttcggagatgccggaagtgctgggcatgagcgatcgcatcatggtgatgcatgaagggcacctcggcggtgaattcacacgcgagcaggccacccaggaagtattgatggctgccgctgtgggcaagcttaaccgtgtgaatcaggagtaaaaaagatgaataacccggctgtttctggtcgtcgctacttcacaaaagcgtggctgatggagcaaaaatcgctgattgccctgctggtgctgattgcgattgtctcgaccatgagccccaacttttttaccgtaaataacctgttcaatattctgcagcagacttcagttaacgccattatggcggttgggatgacgctggttatcctgacttcgggcatcgacctgtccgtcggctccctgctggcgctgaccggcgcggtggcggcttccattgtcgggattgaggtcaacgcgctggtggcggtggccgctgcgctggcgttaggtgcggcaattggcgccgtgaccggcgtgatcgtggcgaaagggcgcgtacaggcatttatcgccacgctggtcatgatgctgctgctgcgcggcgtgacgatggtgtataccaacggcagcccggtaaacaccggctttaccgacaacgccgatctgtttggctggttcgggattggccgtccgctggggatcccaacgccggtgtggattatggcgatcgtcttcctggccgcctggtacatgctgcaccatacccgcctgggtcgttatatctacgcgctcggcggcaacgaagcggcaacgcgtctttccggcatcagcgtgaataaagttaaaatcatcgtctattctttgtgcggcatgctggcctcgctggccggcattattgaggtcgcgcgtctctcttccgcgcagccgacggcgggcactggatatgaactggatgcgattgcggcggtggtgctcggcggtaccagccttgcgggcggtaaaggccgtattgtcgggacgctgattggcgcgttgatccttggctttctgaacaacggactgaatttattaggcgtttcatcctattaccagatgatcgtgaaagcggtggttattttgctggcggtactggtagataacaagaagcagtaactgataactctacaggacatcttaactatgaatatgaaaaaactggcgaccctggtctctgctgtagcgttaagtgcgaccgtaagcgcaaacgcgatggcaaaagacactatcgctctggttatctcaacccttaacaacccgttctttgtctcgctgaaggatggcgcgcaaaaagaagcggacaaactgggctataacctggtggttctggactctcagaataacccggccaaagagctggctaacgtgcaggatttaaccgttcgtggtactaaactgctgctgatcaacccaacggattccgatgcggtgggtaacgccgtgaagctggctaaccaggcgaaaattccggttatcaccctcgaccgtcaggcgtcaaaaggcgacgtggtgagccatatcgcgtctgataacgtgctgggcggtaagatggccggtgactatatcgcgaagaaagtcggtgaaagcgcgaagatcattgaactacagggcattgccgggacgtccgcggcgcgcgagcgtggcgaaggtttccagcaggccgttgctgcgcataagtttaacgttctggccagccagccggcagattttgaccgtaccaagggcctgaacgtcatgcagaacctgctgacggcgcatcctgatgtacaggccgtattcgcccaaaacgatgaaatggcgctgggcgcgctgcgtgccctgcaaacggcaggcaaatctgatgtgatggttgttggatttgacggcactccggatggcgaaaaagcggtaaatagtggcaaactggcagcgaccatcgcccagttaccggagcagatcggcgtgaaaggcgttgagacagccgataaagtgctgaagggcgaaaaagtggaaaccagctatccggttgagttgaaactggtcattaagcaataatgtgcgattcggatcggcgacggtccgagggacaacataataaagaaaagcagggcatgcgccaccggattccggtggcgcgctttccgggaatattgattatgaaaaccgcaggcaaacttgtcgtccttggcagtatcaacgccgatcacatcctgaatcttgacgccttcccaacgccgggtgaaaccgttaccggtcatcactatcaggtcgcttttggcggtaagggcgcaaaccaggcggttgctgccggacgcagcggagctaatatcgcctttatcgcctgtaccggcgatgacgatattggcgaacgcgttcgtcgtcagctggaaagcgataatatcgacgtcgcgccggtcagggccgttgccggagaatcaaccggcgtggcgctgatttttgttaacgctgaaggtgagaatactatcggtattcatgctggcgctaacgccgcgctcagcgtggctcaggttgatgcggaaaaagagcgtattgccggcgcgcaggcgctgctgatgcagctggaatcgccgctggaaagcgtactggccgcggcgaaaatcgctcaccagaatcaaacctcagttatcctcaatccggcgccggcacgtgaactgcccgatgaactgctcacactggtggatatcattacccctaacgagaccgaagcggaaaagctcaccggcgttcgcgtagaaagcgacgatgatgcggcaaaagccgccaaagtgctccatgataaaggtattggtacggtgatcattacgcttggcagccgtggcgtatgggccagcagcgaaggtgaaggtcgtcgggttcccggttttaaagtgcaggtggttgataccatcgccgctggcgatacctttaatggtgcgctggtcaccgcgctgcttgaaggtagcgaactggcgcaggcgattcgttttgcccatgccgccgccgctatcgccgtcacccgcaaaggggctcagccctccgtgccctggcgaaaagaaatagacgaatttttacgtcaacaggggtaacgattggctaccatgaaggatgtagcccgcattgcgggcgtttccacttcgacggtttctcatgtcatcaacaaagatcgtttcgttagcgaagctattaccgctaaagtcgacgccgcgattaagagcctgaactacgcgccgtctgcgctggcgcgcagcctcaaattaaatcaaacccgcaccataggcatgctcattaccgccagtaccaatccgttttactcggagctggtgcgcggcgtggagcgcagctgctttgaacggggttatagccttgtgctgtgtaataccgaaggcgatgaacagcggatgaaccgtaatctggagacgctgatgcaaaagcgcgtcgatggtttactgctgctgtgcactgaaacgcatcaaccttcgccggagattatgcagcgctacccttctgtaccgacggtgatgatggactgggcgccgttcgacggcgatagcgatctgattcaggataactctctactgggcggcgatatggcgacgcagtatctgatcgaccagggctatacgcggattgcctgtattgcgggtccgctggataaaactcctgcccgactgcgcctggagggatatcaggaagcgatggcccgagccggactcacggtacctgaaggatatgtgattagcagcgattttgagtttggcggcggtttcagcgccatgcagaagctgctcatgctgccagcgctgccgcaggcggtgtttatcggtaacgatgcgatggcggtaggcgcctatcaggccctttatcagagcggtctgcgtatcccacaggatatggcgctggtaggctatgacgacattgaactggcgcgctatatgacgccgccgttaaccacaattcatcaaccgaaagatgaactgggcgagctggccatcgatgtgctgattcaccgtatggccgacccgggacaaaaacagcagcgcgtacagttaacccccgagctggtggttcgcggctcagcctaacgcttgtgccgctccttaatcaggttgcggccatcttttgctcttaataaggtaaataccagcgccgataccacggtgataacccccatggtaataaaggtgtagtgaaactgctcgatggtatttgcgctatcgaatccttcataaaaccgcagcaccgccgcgctaacggcgaccccgagactgatcgatagctgctgcgtcacggccaacatgctgttgccgctgctggcgttttcatcggttaaatcggcgagcgtgatggtgttcatggaggtgaactgggtggacattgccattcccagaatgaagagcggcagcagcagcatccagatcgacatatccggcgattgcagcgaaaactgagcgatcatcaggccaataaatatcgtgaccccaaccagcgttttacggtaaccaaaccagcgaagaatctgggtgacggttgatttcgcaataatcgaaccgatagccgtaggcgctatcatgcagccagcaataatcgccggataaccgaagccaacctgtaacatcagcggcatcaggaacggaacgcaaccggtacccaggcgcgtggccaggttgcccgcaatcccgacagagaaagtatgcgtcttaaataaagaaagcgaaatgagcggcgtgggatggcggcgagcgtgacgaatataggcccacagtaaaacgatgctcagggcgattaccgccagagccatccatgtggcgacaattttctcgccaaacagctcgattccgctggaaaacagaaccaggctcaggccaaacaggataaaaccgagcgtgtcgaagcggcgccgtggcgtggtgaaatccggcatatacttgcgggcatacacgatcccgataataccgatgggaatattaatcaggaaaatccagtgccagctggcccaggtcaccagtacgccgccgagcacgggaccgaggatagggccgaccagtccaggcatcgtgacgaagttgagcaccggcagcagttcgctgcgcggataggcgcgcagtagcgccagcctggctaccggcatcatcatggccccgccgatgccctgaatgacgcggaagataaccagttccatcagggagttggaaagcgcgcaggccagggaaccgagggtaaacaggctgacggcgatgataaacacttttcgcgtgccgaagcggtcggccagccaaccgctgaccgggataagcatggccaccgtcagcgtatagctgataatggccgactgcatcgctagcggtgaacggttgagactatgagcgatagcgggaagggctgtattcagaatggtggcgtcgagcgcctgcataaaaaaagccatcgctgcgatccatggcagcccggccatactgcgggctttctttttggtcattcgatacctttgctatttgtcggaatggttgggagcgctcaacaacgcctggcaggtgctcagcgcccgcaagccgtcgctatccagaatggcatcaacgattgcctggtgcagatccagtttcaccacttcattctgcgtaatcgacgtgaagtaggtgtgatagacagaatgaaataaagaagcgaaagagatcaggaaagggttgccgctcatttcatatatatgttcatgccaggccatatcgacttcaatccagcgttcgcgctgaaagttcctcttcagctcaaccatctcctccatcaaagcgttgagctgggctttttgctccggcgtccctgaggttgacgccagaaaacaggcttgaggttccagactgccgcgcatcacgaggaaatggctgacaacatcggagaagttatcttctgttaaccaccaggccaggagttctttatcgagaaagttccagctgctgcgtggcatcacccgcgttccgatgcgcggtcgtggtaaaagcatgccttttgccgctagcgtcttcaccgcttcacgcacggcggtgcggctcacgccaaactgctcgcccagttccatctcgcctggaaggatactttctggctgatattcaccgatcaaaattttttgagccagcttctccgctaatacccaggagatattcttttgtgccgccaactgctgtgcgcttaaagacatacgtgccgttcctttctcttttttaccttaccagtatgccatctggcggcttacttcgttggttaaaacggcaaaacgtcggttttttgctacattacgcgccgtaatgatgaaaaaagaggcggttaaaaagttttttgcatttagcccttgtcacttcggaataactccctataatgcgcctccactgacacggaacaacggcttacagcccgccgggtcagcgggattcagcgatgaataccggcagagaaaagcgaaattaaacgcttgactctgaatgaggaaagcgtaatatacgccacctcgcaacggtgagcgaaagccgcgttgcactgctctttaacaatttatcagacaatctgtgtgggcactcaaagtgacatggattcttaacgtcgcaagacgaaaaatgaataccaagtctctgagtgaacatacgtaattcattacgaagtttaattcacgagcatcaaacttaaattgaagagtttgatcatggctcagattgaacgctggcggcaggcctaacacatgcaagtcgaacggtagcacagagagcttgctctcgggtgacgagtggcggacgggtgagtaatgtctgggaaactgcctgatggagggggataactactggaaacggtagctaataccgcataacgtcgcaagaccaaagagggggaccttcgggcctcttgccatcagatgtgcccagatgggattagctagtaggtggggtaacggctcacctaggcgacgatccctagctggtctgagaggatgaccagccacactggaactgagacacggtccagactcctacgggaggcagcagtggggaatattgcacaatgggcgcaagcctgatgcagccatgccgcgtgtatgaagaaggccttcgggttgtaaagtactttcagcggggaggaaggcgataaggttaataaccttgtcgattgacgttacccgcagaagaagcaccggctaactccgtgccagcagccgcggtaatacggagggtgcaagcgttaatcggaattactgggcgtaaagcgcacgcaggcggtctgtcaagtcggatgtgaaatccccgggctcaacctgggaactgcattcgaaactggcaggctggagtcttgtagaggggggtagaattccaggtgtagcggtgaaatgcgtagagatctggaggaataccggtggcgaaggcggccccctggacaaagactgacgctcaggtgcgaaagcgtggggagcaaacaggattagataccctggtagtccacgctgtaaacgatgtcgacttggaggttgttcccttgaggagtggcttccggagctaacgcgttaagtcgaccgcctggggagtacggccgcaaggttaaaactcaaatgaattgacgggggcccgcacaagcggtggagcatgtggtttaattcgatgcaacgcgaagaaccttacctactcttgacatccacggaacttagcagagatgctttggtgccttcgggaaccgtgagacaggtgctgcatggctgtcgtcagctcgtgttgtgaaatgttgggttaagtcccgcaacgagcgcaacccttatcctttgttgccagcggtccggccgggaactcaaaggagactgccagtgataaactggaggaaggtggggatgacgtcaagtcatcatggcccttacgagtagggctacacacgtgctacaatggcatatacaaagagaagcgacctcgcgagagcaagcagacctcataaagtatgtcgtagtccggattggagtctgcaactcgactccatgaagtcggaatcgctagtaatcgtggatcagaatgccacggtgaatacgttcccgggccttgtacacaccgcccgtcacaccatgggagtgggttgcaaaagaagtaggtagcttaaccttcgggagggcgcttaccactttgtgattcatgactggggtgaagtcgtaacaaggtaaccgtaggggaacctgcggttggatcacctccttaccttaaagaacctgcctttgtagtgtccacacagattgtctgatgaatgatgaatttcaaaatgtactgtgaagtgcattgtgaaattttgctctttaaaaatctggatcaagctgaaaattgaaacgacacactgtttaagtgtgttcgagtctctcaaattttcgcgacacgacgatgttttacgaaacatcttcgggttgtgaggttaagcgactaagcgtacacggtggatgccctggcagtcagaggcgatgaaggacgtgctaatctgcgaaaagcgtcggtaaggtgatatgaaccgttacagccggcgatgtccgaatggggaaacccagtgcaattcgttgcactatcgttaactgaatacataggttaacgaggcgaaccgggggaactgaaacatctaagtaccccgaggaaaagaaatcaaccgagattcccccagtagcggcgagcgaacggggagcagcccggagtctgaatcagcttgtgtgttagtggaagcgtctggaaagtcgcagggtacagggtgatactcccgtacactaaaacacacaggttgtgaactcgaagagtagggcgggacacgtggtatcctgtctgaatatggggggaccatcctccaaggctaaatactcctgactgaccgatagtgaaccagtaccgtgagggaaaggcgaaaagaaccccggcgaggggagtgaaaaagaacctgaaaccgtgtacgtacaagcagtaggagcccactggttgggtgactgcgtaccttttgtataatgggtcagcgacttatattctgtagcaaggttaaccgtataggggagccgcagggaaaccgagtcttaactgggcgttaagttgcagggtatagacccgaaacccggtgatctagccatgggcaggttgaaggttgggtaacactaactggaggaccgaaccgactaatgttgaaaaattagcggatgacttgtggctgggggtgaaaggccaatcaaaccgggagatagctggttctccccgaaagctatttaggtagcgcctcgtgaactcatcttcgggggtagagcactgtttcggctagggggtcatcccgacttaccaacccgatgcaaactacgaataccgaagaatgttatcacgggagacacacggcgggtgctaacgtccgtcgtgaagagggaaacaacccagaccgccagctaaggtcccaaagtcatggttaagtgggaaacgatgtgggaaggcccagacagccaggatgttggcttagaagcagccatcatttaaagaaagcgtaatagctcactggtcgagtcggcctgcgcggaagatgtaacggggctaaaccatgcaccgaagctgcggcagcgacactatgtgttgttgggtaggggagcgttctgtaagccgttgaaggtggcctgtgagggttgctggaggtatcagaagtgcgaatgctgacataagtaacgataatgcgggtgaaaaacccgcacgccggaagaccaagggttcctgtccaacgttaatcggggcagggtgagtcgacccctaaggcgaggccgaaaggcgtagtcgatgggaaacaggttaatattcctgtactcggtgttactgcgaaggggggacggagaaggctatgttggccgggcgacggttgtcccggtttaagcatgtaggcggatgttccaggtaaatccggaacgtcactaacgctgaggtgtgatgacgaggcactacggtgctgaagtgacaaatgccctgcttccaggaaaagcctctaagcatcaggtaacatcaaatcgtaccccaaaccgacacaggtggtcaggtagagaataccaaggcgcttgagagaactcgggtgaaggaactaggcaaaatggtgccgtaacttcgggagaaggcacgctgatggtaggtgaagtgacttgctcatggagctgaaatcagtcgaagataccagctggctgcaactgtttattaaaaacacagcactgtgcaaacacgaaagtggacgtatacggtgtgacgcctgcccggtgccggaaggttaattgatggggtcatccgtaaggagaagctcttgatcgaagccccggtaaacggcggccgtaactataacggtcctaaggtagcgaaattccttgtcgggtaagttccgacctgcacgaatggcgtaatgatggccaggctgtctccacccgagactcagtgaaattgaactcgctgtgaagatgcagtgtacccgcggcaagacggaaagaccccgtgaacctttactatagcttgacactgaacactggtccttgatgtgtaggataggtgggaggctttgaagtgtggacgccagtctgcatggagccatccttgaaataccaccctttaatggctggtgttctaacgtgggcccgtaatccgggttgcggacagtgtctggtgggtagtttgactggggcggtctcctcctaaagagtaacggaggagcacgaaggtcagctaatcctggtcggacatcaggaggttagtgcaatggcataagctggcttgactgcgagcgtgacggcgcgagcaggtgcgaaagcaggtcatagtgatccggtggttctgaatggaagggccatcgctcaacggataaaaggtactccggggataacaggctgataccgcccaagagttcatatcgacggcggtgtttggcacctcgatgtcggctcatcacatcctggggctgaagtaggtcccaagggtatggctgttcgccatttaaagtggtacgcgagctgggtttagaacgtcgtgagacagttcggtccctatctgccgtgggcgctggagaattgaggggggctgctcctagtacgagaggaccggagtggacgcatcactggtgttcgggttgtcatgccaatggcattgcccggtagctaaatgcggaagagataagtgctgaaagcatctaagcacgaaacttgccccgagatgagttctccctgaccctttaagggtcctgaaggaacgttgaagacgacgacgttgataggccgggtgtgtaagcgcagcgatgcgttgagctaaccggtactaatgaaccgtgaggcttaaccttacaacgccgaagatgttttggcaaattgagagattttcaggcaagattcagagttgagtacgcaataatttgcgcagcagcaaggcgacaagcgaaggaaaggaaggagcatactgaggtatgtgactgactttacgagcgcgggcaacgcagctgatgcgataaagaattgcgtactgagcacaaagaatttgcctggcggcactagcgcggtggtcccacctgaccccatgccgaactcagaagtgaaacgccgtagcgccgatggtagtgtggggtctccccatgtgagagtagggaactgccaggcatcaaacaagtgaagagcccatcctgacggatgggctttttgcgtttttgtcgcctgaaactatcagcagatgccttcagaaggcgcgatcatggctatatctctgcaataactatcggtcctcgttaaacccctttaaccactgcataataaaagcggctatttgcgggacatcatttaaatctaacaatggaagcgacgtctcgaccggcgtatcgctggctatggcaatcacgtcatcgtcataaactaattcttcaatgctatgtccgctgttttgccgaaaaagcaggattttgggcacagcttcatgcttaaaaccctcaaccaggactaaatctaacgttgatgcatccattcggctaaccagccattccagatccagcggaggctcttcgggtgtttccgtcattaatgcccaacgctgggagctggcgacaatcgtctgagccgctccggctttacgcagttcatagctgtctttaccgggcttatccacgtccatatcatgatgagtatgtttaattagccctggccgtaagcctcccgcgcgcagtgccggaatcagcgacttcagtagggtggttttacctgtaccgctccaggctgcgatggctaaaagcgggatcatgatggcacctgcatacgttgcaaatcgtcgagagtattgacgttaataaatgctgattttacatcgctaaaatcgacgctatgaccgccaattttgcgcagaaataccattacccgtctttctcctgccgccagatacgtttccagttcgccgatcgcctcgcgattcaccagagcaatggccggatggtcacgttcaccatcgtgtacccaaacggctggagatgattttctctgctgtattaagcgcgtcgccagaaatgatgggataaatggcgtatcacagggacaaaacagaaaccactcgccctcaacctgatgcattacggaaagcatgccggccaacggcccgggaaagtcgttcagagagtcggtaataatcgggtagccgctgcttcgccagcaatcaagattgcggttagcgctaattaccagctttgtaacctgcggctgcagcgcatcggcgacatgacgccacagggctttacctttcagcagctgtaatcctttatctattcctcccatgcgtgagcctcttcctcccgccagcacgacgccggttatgaccttgccctgcatattaatatcgcctctttcattgtgggattgtccctgctaacgtattcctatcaagagtaaggagcattgctatgaaatgtaaacgtctgaatgaagtcattgaactcctccagccagcctggcagaaagaacccgagctgaatttaatgcaatttttgcaaaaactggcgaaagaggccggatacaccggtgagttgaacgatctctccgacgatattctgatttatcatctgaagatgcgcgactcggcaaaagaagctgttattcccgggattcagaaagattatgaagaagattttaaaaccgcgctgctacgcgctcgcggcgtgattaaagagtaaaaggttgtaagcgctgccgcggaatcggcaatgagatgatatcctgtatcattcgtacgattatcggatgtcaggatgcacgataaggctttcacttttcagacgcttcacccggataccatcattgatggcttatttgatctgggaatgcgggtggactccggtctcacaccgcttaatagctatgagaaccgggtttaccagtttcaggacgaagatcgtcgccgctatgtggtgaagttctatcgtcctgagcgttggtcagcccaacaaatcctcgaagaacatcagttttccctccagctcgtgcaggacgaagtccctgtagcggcgccgttgtcgtttaacgacagtacccttcatcagcatcagggattctttttcgccgtattcccaagcctgggtggacgtcagtttgaggcggataacctcgatcagatggaatgggttgggcgctaccttggccgtctgcatcaaactggacgcaaacagcgttttgtcgctcgtccggagatagggacgaatgagtatcttcttgagccacgccaggtctttgagctttccccgctgatacctgcaggtctgaaagaggcttttctcagcgctaccgataagctgattgatgcggtaatggcgcaatggcacggacgcgccaatattttacggttacacggtgattgccatgcgggaaacatcctctggcgcgatgggccactgtttgttgatttagatgattcacgtaatggacctgctatccaggatctgtggatgttgttgaacggcgataaagccgagcaacggatgcagcttgagatgatcattgaagcgtatgaagagttcagcgctttcaataccgatgaaattgccctcatcgaacctttacgtgcaatgcggttagtttattatctggcgtggttattaaggcgctgggaagatcccgcttttcctaaaaacttcccgtggttaaccggggaagattactggcgcgggcagacaacaacttttcttgagcaggtaaaggttctgcaggaaccgcctcttcagttaacgccaatgtattaatgtgatatatccaggagagaattaatcatgaaaaaaatttggctggcgctggctggtatgattctggctttcagtgcatccgctgcccagatcaccgacggtaagcagtacattaccctcgataagcccgttgccggtgagccgcaggtgctcgagtttttctcgttctactgcccgcattgctatcagtttgaggaagttcttcatgtatcagataacgtgaagaaaaagctgcctgaaggcgtaaaaatgacgaaataccacgttgagttcctgggtccgttaggcaaggatctgactcaggcgtgggccgttgcgatggcgctgggcgtggaagataaaatcaccgtgccgatgtttgaagcggtacagaaaaaccagaccgtccagaccgtggccgatatccgtaaggtcttcgttgacgccggcgttaaaggtgaagattacgatgcagcctggaacagcttcgtggtgaaatccctggtggctcagcaagagaaagccgccgctgatttccagctgcagggcgtgccggctatgtacgttaacggtaaataccagctaaacccgcagggtatggataccagcaacatggacgcatttgttgcccagtatgccgataccgttaagcagctcgttgagaagaaataaaaaataaacgccggttactgaccggcgtttttcttttctgcgcccacaattatttctctgcctgctgcattatttccgttagctgccgatctttctcttcccaaagcctgtttagccagcgctgaaagcgtcgcttaaagtttttgtcatttacataatcgccgtgcagctcttccatcacaggttcaagactgactcgcaccacaacccgcgttaatcggccgctcagcatgtcataaaacggcttttggttgttttccggatagcataacgtgacgttcaaaagcttatcaaactgcgagccgagcacgtttaatgccatggcaatacccgcagcctttggcgataacagattctggtaaggcgaacgggtctgctgttgcttttcttccgtgaaacgagagccttcgacaaagttaacaatcgttgttggatgcgcgcggaatttctcgcaggagcggcgagtggtttcaacatctttgccccggcgttctggatggcggagtaaatagcctcgggaatagcggcgcataaaaggcatatccagcgcccagcaggccagcccaataaacggcacccaggcgagctgttgcttgaggaaatatttattcatcgggatatgtttgcgaaacagcacgcaaagcaccacgatatctgcccagctatggtggttgctgatgagcagataccagtttttcttattcaggccatccaggccctgtacatcccatttaagccagggattaagacgcagcagcagagccagcccttcacaccagcagtacatcatgaaattgcaaaaaatggatatcgagcgccagaccgcaggaataggcacaagaagtttaatcagcccggcgacgatgattggcaccgagcagattatggtgactatgatagtcagggcgatactcagcgggagcgttatcgcggcgagtaatctcgacatagttaatttattcagaaagttaggctgtcaaagaacgcgtttaaacggcgcaagaggctgattttaccagaaaatagcgtaaataacgggtcttaccagaacagaaaaattttcggatcttatatccacatggaacattgagtcgccatgatgttattaaagcaaattatgagtgtataacttaatgataaatatgaaataatttgtttatggatgatttgattaacgattgtttggctgtcgttataaaaatattcacaaagttatccacaggatagcccataacgcgatcgaaaggatcgcagaatcttttcgacgaaatgcgggaaaaattcaggatttaatgcccgtctgtggcatcctttaccgataatctgataaacaggcacggaaattatggttcagatcccagaaaaccctctcatcctcgttgacggctcctcttacctttatcgggcatatcacgcgttccccccgctgacgaatagcgctggtgaaccgacaggcgcaatgtatggcgtgctgaatatgctgcgaagcctgatcctgcagtatcaaccgacccacgctgtcgtcgtgtttgatgccaaggggaagactttccgtgatgaactgtttgagcactataaatctcatcgcccgccgatgccggacgatctgcgtgcgcagatcgagccgctgcatgccatggtaaaagcgatgggcctgccgctaatggctgttcctggcgtagaagccgatgatgtcatcggtaccctggcgcgcgaagctgaaaaggtcgggcgtccggtactgattagcaccggcgataaagatatggcccagctggttacgccgggtattacgctgattaacaccatgaccaatactatccttggccccgatgaagtggtgacgaaatacggcgtaccaccggagctgatcatcgattttctggctctgatgggagattcatcggacaatattcccggcgtacctggcgtgggagaaaagactgcgcaggcgttactgcaggggctgggtggtcttgatacgttatatgctgagcctgaaaaaatcgccgggctgaccttccgcggcgcaaaaacgatggccgcaaagctggaacagaataaagaggtggcatacctctcttatcagctggcgacgatcaaaacggacgttgagctggagctgggctgtgaagatttgctggttgcgcaacccgtcgctgatgaactgctcacgctgtttaaaaaatatgaattcaaacgctggatcaccgatgtagagtccggcaagtggatgcaggcaaaaggcgctaagcctgcggcaaaggcggttgtagcggtggctgacgtggccgatgcggaggaggaaaccgcgacggcgctctcttctgaaaattatgtcacgatccttgatgaagaaacattgttgacctgggttgagagcctgaagaaagcgccgctttttgcctttgataccgaaactgacagcctcgataacgtatccgccaatatggtcggcttatccttcgccattgagcctggcgttgcggcctatgtaccggttgcccatgattatctggatgcaccggatcagatcccgcgcgaccgtgtccttgagctgctgaaaccgctactggaagatgacaaggttctgaaggttgggcaaaacctcaaatatgaccgcggtatcctggctaactacggcattgaactgcgcggtattgcctttgataccatgctggaatcctacattcttgacagcgtggcgggccgccatgatatggatagcctctccgatcgctggctgaagcacaaaaccattacctttgaagagattgcgggtaaaggtaaaaaccagctcacattcaatcagatcgcgctggaagaagcgggccgctacgcggcggaagatgccgatgtcacgctgcagctgcacctcaaaatgtggcctgaacttcagcaaaatgaaggcccgctgaacatctttaaaaatattgaaatgccgctggtgccggtgctatcccgcgtggagcgtaacggagtgaagattgatccggccgtgctgcatgcgcattctcaggagatagccaaacgcctgattgagctggagaagaaggcgtatgatatcgcgggtgaggagtttaacctctcttcgccgaagcagctgcaaaccatcctgtttgaaaaacaaggtattaagccgctgaagaaaaccccgggcggcgcgccgtctacctcggaagaggtgctggaagagctggcgctggactatccgctgccgaaagtcatcctcgagtatcgtggtctggcaaaactcaaatccacctataccgataagctgccgctgatgatcagcccgaaaacgggccgggttcacacctcttatcaccaggcggttacggcaacgggacgtttgtcgtctacagacccgaacctgcagaacattccggtgcgcaacgaagaagggcggcgtatccgtcaggcgtttattgctccggaagattatctcattgtctctgccgactactcgcaaattgaactgcgcatcatggcgcatctttcccgcgacaagggcctgctgaccgcgtttgcggaagggaaggatatccaccgcgcgacggcggcagaggtctttggtttgccgctggagagcgtcagcagcgaacagcgccgcagcgcgaaggcgatcaacttcggcctgatttacggcatgagcgcattcggccttgcgcgccagctcaatattccacgcaaagaagcgcaaaagtatatggatctctactttgagcgctatccgggcgtgctggagtatatggagcgcacccgcacccaggccaaagagcaggggtatgttgaaacgcttgatggccgtcgtctctacctgccggacatcaaatccagcaacggcgcgcgccgcgccggtgccgagcgtgcggcgatcaatgcgccgatgcagggaaccgctgccgacattattaagcgcgcgatgatcgccgtagatagctggttattaagcgaaaaaccgcgcgtgcggatgattatgcaggtacacgatgaactggtctttgaagtgcataaagacgaccttgaggcggttgcgaaaaagatccacgaactgatggaaagcagcacgacgctggcggttccgctgctggtggaagtgggtagtggagaaaactgggatcaagcgcactaagtattcggtaaggaaggtcatttcttgtaagtgagtaacataacttatcgcattttgtgatgatcatttgaatttgctatgtaaagagtgaaaaaaaactacaaaaaatgctttatccgtaaccgaaagaagagtagagttaaagacgtagggtacagaggtaagatgttctatctttcagaccttttacttcacgtaatcggatttggctgaatattttagccgccccggtcatttatgaccggggcgttttttattgcgcgaaagaaaattttttgcgtatcgatgctgatgaggcgggctacccggatagagccccacgcgccgctatccggagaagttagcgagattattcgccgtcttcagaggcttcctgaggagggatatcgttataccagctatccagcttctgccgtagtttatccacgccctgcttcttcagggaagaaaacgcttcgacctgcacatctccgttaaaggcggtgaccgcttcacgaaccatggcgatctgcgcttttcgcgcgccgctggccagcttatcggctttggttagcagcaccagtaccgggatatcgctttccaccgcccattggatcatctgctgatcgagatctttaagcggatgacgaatatccatcaacacaaccagccctttcagacagaggcgtttctccagatattcacccagcgcgcgctgccacttgattttcatctcttccggaacctgggcatatccatagcccggcaggtcgaccaggcgtttgccttcagcgacttcaaacaggttaataagctgcgtacggcctggcgtcttcgaagtacgcgcgaggcttttctggttagtcagcgtgttcagcgcgctggatttcccggcgttagagcggccagcaaaggccacttcaataccggtatcggcaggaagatggcggatatctggcgcgctagtgacaaaatgcgtcagttgataattccagttggtcaagacggtcgtctccgttaaatcaggctttgacggggattatacctgaacaacagaaaaaggctgtttttaccgcacctcatcgctgtaagttaaaaccacagtctttgtgagacattggctattggttatatgcgaaattcatgagaaaagtctgattaaaaataatacaaagttatataaatcattgcattaaaatgaaagaaaattctgaaactcgttttttttctgtacagtcggttgtaggtttcccgcaaaccagtaaagtagcggtcaagggcgaggatgctaacaggattatgactcaggatgaggagtcaggaagcgccaggaggcgaagactacggattgtcaggatgacaaacgtctggagacgttttaaaaggaaatggatgtaacagggatcgttggtagctaaaggaaagacagggtgtgtcgttagctaacatggaaagtagaagcccattaagggttatcagtgcggaaaaaggcgacagagtaatctgtcgccttttttctttgcttgctttctgctagattccgcctcaattctatactgaagaaaacggcctgaagattacacaacatgaaaaaaccgacatccgtacctcgcggcaaaaaaaatcgcaaaacgcgtgaagaattgaaccaggaagcccgcgagcgcaagcatcagaagaagcatcgcggccacgcggcaggaagtcgtgcgaccggcggcgacaccgcttcagcaggtaaaaaacaaggtcagcagcaagatccccgaattggcagtaaaaaaccaatcccgctgggcgtaactgaaaatgctccggcgattaagcagcataaaccaaagagcgagaaacctatgctttcaccgcaggctgagctggatttgctggagaacgatgagcgcctggacgcgctgctggaacgtctggaagagggcggtaccctgaatgctgaagagcaagcctgggttgacgccaagctggatcgtattgatgagctgatgcagcagctgggcctctcatacgatgatgacgaagatgaagaagaggaagagcgcaaagaagatatgatgcgcctgctgaagggtggaaactaacgtttgcaccccatcggattcccggtcctgcttataacccttctggttatatgttatctgctgtggttattcgttaaactacgacggttgtcgcggcgtcagaaatggctgcgcaaccggctcattacccgaggtgcggttgggccggggcggcgtacccgccgacggtaccatcggaaggagtgagcatgtctgtgcagttaatcgactgggatctggccctgatccagaaatataactattccgggccgcgttatacttcgtatcccaccgcgctggagttttctccagaatttggcgccgctgaatttgatgcggcggtagcccgctatccgcagcgtcccctctcgctgtacgtgcatatcccgttttgccataaactctgctatttctgcggctgcaacaaaatcgtcacccgtcagcagcataaggccgaccagtatctggatgtgcttgagcaggagattattcatcgcgcgccgctttttgctggccgcaaagttaatcagctgcactggggcggcggtacgccaacctatttaaacaaggcgcaaattagtcgtctgatgggtctgctacgtacccatttcaattttaacgcggatgcagagatctccattgaggttgatccgcgcgaaatcgaactcgatgtcctggatcatttacgcctcgaaggctttaatcgcctgagtatgggcgtgcaggacttcaacaaagaagtgcagcgcctggtgaaccgcgagcaggatgaagcgtttatcttcgcgctactcaaccacgcgcgcgatatcggctttacctctaccaatatcgacctgatttacggtctgccgaagcaaacgccgcagagcttcgcgtatacgctacagaaagtggcggagctcaaccccgatcgtctgagcgtattcaactatgcgcatctgccaacgctctttgctgcgcagcgcaaaatcaaagacgccgatctgccttctgcagaacagaagctggacattcttcaggagacgattgtttcgctgacggccgcgggatatcagtttatcggcatggaccactttgcccgtccggatgatgagctggcgatagcccagcgtgaaggtatcctgcatcgtaacttccaggggtataccactcagggagacaccgatctgctggggatgggcgtctcggcgatcagcatgattggcgattgctatgcgcagaaccagaaagagctgaagcagtattatcagcaggttgatgaaaccggaacggcgctgtggcgcggtattgcgttgacgcgcgatgactgcattcgtcgcgacgtgattaaggcgctaatttgtcacttccgtctcgacttcgctgcggtagaagcgcagtggaatcttaccttcgatagctactttgccgacgatatgaaattgctggcgccgctggccaaagatgggctggtggatgtggatgagaagggcattcaggtgacgccgaaaggccggctgctgatacgcaatatctgcatgtgttttgatacgtatctgcgccagaaagcgcggatgcagcagttttcccgcgtgatataaagcatacccccactccaggaaggagcgggggtattatcagctaaacagcccaaccatcgccgcgcacagaacggcagctaccgccgtctgcggcgtatgacccgctgcaacaccgctcgatataatattaataaatgattcaagcatgatttctcccccgtctttccgggcaagatcatactcaacgcatggcaacagtaaagtacaaaatagcagcagtttgcgctggatgactattttttactcgccgccgcgctgctactccattcccagctcttttagcttacgcgtcagggtattacgaccccagcccagcaggcgagccgcctcttgtttatgcccctgcgtgtggcgtaacgcggtggtcagcagcgtgcgctccatctccggctgcgcttccgagagcaggttttgatgaccggaacgcaaagcgcgatcggcccattgccccagcagcgtggcccagctatccggcagcatttgcgtcgggttatccggtatcgccgtttcaaacagctcgctgggaagatcctgcgtcagaacctcctgacctgcggccattaccgtcagccagcgacaggtgttttccagctgacgtacgttgcccggccatgccagtcgggttaacgccatctccgtctccggatgcagctgtttggcctcgacgcccagctcacgggcggcgatttgcaggaaatgtctcgccagtcgcgggatatcttcccgacgctcgcgcagcggcggcagatggacgcgaatcacgttcaggcggtgaaataaatcctcgcggaattttccttcctggacgcgcagctcaaggttctggtgggtggcggcaataatgcgtacatccaccttcaccggcgcatagccccccacgcgataaaactggccatcggccagtacgcgcagcagacgagtctgtacgtccagcggcatatcgccgatctcgtcgaggaacagcgtgccgccgtctgcctgctcgaatcgcccctggcgcacggtattggcgccggtaaaggcccctttctcgtggccaaacagttctgactcaatcagatctttcggaatggccgccatatttagcgcgataaacggcgccttggcgcgcgggctgtggcggtggagagcgtgggcaaccagctctttaccggtaccagactcgccgttgatcagtacgctgattgatgaacgcgacaggcggccgataatgcggaagacgtcctgcatggccggcgcttcgccgatgatatcggccgttgggctattaatcggcgcattacgcggctgctgctgttcctggtaatggctaatggcacgatcaaccagcgccaccgcttcatcgatatcaaacggtttcggcagataatcaaaggcgccctgctgataggcgctgaccgccgcgtcaagatccgaatgcgccgtcattatgatgaccgggagcatcggattgcgctgtttaatttgctttagcagcgccagtccatccattcccggcatgcggatatcagacagcagcacatccggggttttggtcgtgagggcatcaagcacctcgttgccgctttcaaacgtcgtacaacttaagcctgccccggtgagcgcgcgttcaagcacccaacggatggagctatcgtcgtcaacgatccatgctatccctcgttgcataaacacctctacttccgaataggcaggtacaccgagaattcggtatgccctggccaactggtaaattcaattttgccggagtgctgatcgataaggctgcgggcgatagacagcccgagtccggtgccgccttcgcgcccgctcaccatcggataaaacagcgtatcctgtaagtgagacggtattcccgggccgttatcttcaacgtcgatacgcgcagcgaggcggtagcgcacgccgtgcagggttaactgaaaggccgtacgggtgcgcagagtgatttcgccgccctccggtcccagagcctgcagcgcatttcggacgatattcagcagcacctgttcaatttggtccgggtcgtgcggcagttctggcaggctggggtcatagtcgcgaaccagcttgacgttatccggcagctccatcgacacaagctttaccacccgctcagcgaccttgtggatgctttctgttacgtgcattccgggatgctgtggtcccagcagacggtcaaccagatttcttaaccgatcggcctgttcaataatgactttggtatattccatcagcgcaggatcgggcagcgctttgctcagcagctgtgccgcgccgcgcagaccacccagcggatttttaatctcgtgggccaggccacgcactaagtcgcgagcggcaatctgctgtgcgtgctgtagctgctcctggctcagacggcgctgattatccatcggcgccatttccagcaggatatagccttcaggcaggcgttgcgccgtcagggaaaggatgtgcgagcggccatcaatgaccagcgtcacttcgttatcggtaaacccttgacccgcagcgaggctctcctgcatgaggccgatattcagcgagaaatagctcaacagctccggcagcggcgtgccgaataatttacgcgaactttgcgccagcagctgctgcgccgccgggttcgcgtaatgcaccgccaggtcgtcatcgaccagtaagatactgttgattaaagagttaaggatctgcccagcatcgggcagtgtgcctgttgccattcgacagtctcctgaaaatgagtgcactattttagtgcagtatagctttttatgtataaaaagctcatgagatcagcgtgttggtggagaaaaaagcccatcctgagatgggctgaaagtttccacggcaacaaaacatccttggtatcccacgccacaacacggaataccgcggatttacagcaaaattagacgctgtagtacagctcgaactcaaccgggtgcggagtcatacgtacgcggtcgttttcttcaatacgcagggcgatgtaagcatcgatagcgtcgttggtgaatacgccaccggcggtcaggaattcacggtctgcgtccagcgcgttcagtgcttcttccagagaacctgcaacctgtgggatctctttcgcttcttccggcggcagatcgtacaggtttttatccatggcttcgcccggatggattttgttcttgataccgtcaaggccagccatcagcagcgcagcgaagcacaggtacgggttagccgccgggtccgggaagcgaacttcgatacggcgcgctttcggagaggtgacaaccggaatacggatagacgcggaacggttacgggcagagtaagccagcataaccggcgcttcgtaacccgggaccagacgcttgtaggagttggtggtcgggttagccagggcgttaatcgctttagcgtgtttgataacgccgccgatgtagtacagcgcttgttcagacaggcctgcgtatttgtcgccagagaacaggtttacgccgttcttggagagggacatgtggcagtgcataccggaaccgttatcgccaaacatcggttttggcataaaggtcgcggttttgccgaaacggtgtgcgacgttgtgcacaacgtatttgtaaatctgaatttcgtccgcttttttggtcatggtgttaaagcgggtagcgatttcgttctgacccgcagtcgccacttcgtggtggtgagcttcaacaaccaggcccatctcttccatgatcatacacatggtggagcggatatcctgagaggagtctaccggcggaaccgggaagtaaccgcctttcacgcccggacggtggcctttgttgccgccttcgtatttggtggaggagttccatgcgccttcgatatcatcgatagcaacgtgggaaccggagatggacgcaccaaaacggatgtcgtcgaacaggaagaattctggttctggcccgaacagtacggtgtcagccaggccggtagagcgcagatactcttcagcgcgcttagcaatggagcgcgggtcacggtcatagccctgcagcgtgccgggttccaggatgtcgcagcggatgatcagcgtcggttcttcatagaacggatcgatcagcgcggtggttgcatccggcatcaggaccatgtcggattcgttaatacctttccagccgccaatcgaggagccatcaaacattttgccttcttcgaagaattcggcatttacctgatgagaaggaatagtaacgtgctgttctttacctttggtatcggtgaagcgcagatcgacaaacttcacttcatgctcgttcagcatcgtcaaaacgtgttcagcggacatacttaaactctcccggattggtcattgtcgtcgtggaaacgaaaactttttaactacgaaaagtggcgttgttgccttaaaaaatataaagcgaaatctgtgccaacttttaaattgcccccaaaaggcgttatcatgcacatcatcgtgcaaaagggctgcaccaaaatgaatgcattgcaccaatatagtgcatttgtgtgaacattgggcacttatttggtgcaattgacctttaataacccttttaacgctccgtgaaagcgatcacaaagaatctctgcaatacttgtttgcggaggatgtttgtgatcctgttttgtactgcgattaatccgtgtacaataacgcgctatttctaatgcctgaggcaaagttgtgatcgaaaatttgcgtaatatcgccatcatcgcgcacgttgaccatggtaaaactaccctggttgataagctgctacagcaatccggtacgttcgacgcgcgtgccgaaactcaagagcgagtgatggactccaacgatttggagaaagagcgcgggattaccatcctggctaaaaacaccgctatcaaatggaatgactaccgtatcaacatcgttgataccccagggcacgccgacttcggtggtgaagttgaacgtgtcatgtccatggttgattccgttctgttggtcgttgatgcaatggatggtccgatgccgcaaacgcgcttcgtgaccaaaaaagcctttgctcatggcctgaagccaattgttgttatcaacaaagttgaccgtccgggcgcgcgtcctgactgggttgtcgatcaggtattcgacctgttcgttaacctcgacgctaccgacgagcagctggacttccctatcgtttacgcttctgcgctgaacggtatcgcgggtctggatcacgaagatatggctgaagacatgacgccgctgtatcaaaccatcgtcgatcgcgtaccggcgccgaacgttgaccttgatggcccgctgcagatgcaaatctcccagctggactacaacaactacgttggcgtcatcggcatcggccgcatcaagcgcggtaaagtgaagccgaaccagcaggtcactatcattgatagcgaaggcaaaacccgtaacggtaaagtcggtaaagttctgacccatctgggccttgagcgtatcgagagcgacgtcgcagaagctggcgatattatcgcgatcaccggtctgggcgaactgaacatctctgacaccatctgcgatacgcagaatgttgaagcgctgccggcgctgtccgttgatgagccgaccgtctctatgttcttctgcgttaacacctcgccgttctgtggtaaagaaggtaagtacgttacctctcgtcagatccttgaccgcctgaacaaagagctggtacataacgtcgcgctgcgcgttgaagaaacgccggatgcagacgcattccgcgtttctggtcgtggtgaactgcacctgtccgttcttatcgagaacatgcgtcgtgaaggtttcgaaatggcggtttcccgtccgaaagttatcttccgcgaaatcgatggccgtaagcaagagccgttcgaaaacgtcacgctggacgttgaagagcagcaccagggttctgtgatgcaggcgctgggtgagcgtaaaggcgatctgaaaaacatgaatccagatggcaaaggccgcgtacgtctcgactacgtgatcccaagccgtggtctgatcggcttccgttcagaattcatgaccatgacctccggtaccggtctgctgtactccaccttcagccactacgacgacgttcgtgcgggtgatgtgggtcagcgtcagaacggtgttctgatctccaacggccagggtaaagcggttgcgttcgcactgttcagcctgcaggatcgcggtaagctgttcctgggccacggcgcagaagtttacgaaggccagattatcggtattcacagtcgttctaacgacctgacggtaaactgcctgaccggtaagaaactgaccaacatgcgtgcgtccggtactgacgaagcaacggttctggttccgccggttaagatgaccctggagcaggctctggagttcatcgatgacgacgaactggtagaagtcaccccgacttctgtccgtatccgtaaacgtcacctgaccgagaacgaccgtaaacgcgcgatgcgcggtgcgaaagaagattaattaacgcttctttccgctatctgaaccctgcctcaatggcagggtttcttttttgtacaaagccctgccgcccgtagtcaaactccccctttcccgctacagttaattttccacggtgcaaaaggagaggaccatgctctatatctttgatttaggtaatgtgattgtcgatattgacttcaaccgggtgctcgggacgtggagtgatttaacgcgcattccccttgcgacgctgcagcagcatttcaccatgggcgaagcgttccaccagcatgagcgcggtgaaattagcgacgaagattttgcggcggcgatgtgccatgaaatgaacatgtcgctaagctacgagcagttctcccacggctggcaggcggttttcgttgccctgcgcccggaggttatcgcgattatgcaaaaattacgcgagcaggggcatcgcgttgtggttctgtccaacacgaaccgtttgcatacgactttctggccggatgagtaccctgatatacgcgccgttgctgaccatatctatctttctcaagagatggggatgcgtaaaccggaagcgcggatctatcagagcgtcctcgacgctgaaggtttcgccgctgacgatacggtcttcttcgatgataacgcggacaatatcgccggggctaaccagctgggcataaccagtattctggtgaccgggaaggaaaccatccccaactactttgctaaacagctatgctaaaaaccgttcatcaaaaaacaacgcgccatctgcggccgctggtcgcctggctaaagctgtatggcggcgtattgatgaagataatatgacgaccctggcaggcaacctcgcctacgtgtcgttactctcccttgtgccgctgattgccgtcgtgttcgcgctgttcgcggcatttccgatgttttctgatgtcagtattcagattcgccactttattttcgccaatttcattccggcaaccggagatgtcattcagggctatattgagcagtttgtcgccaactccagccggatgaccgctgtgggcgctttcggcctgattgtgacatctctgctgctgatgtattcgattgatagcgcgttgaacaccatctggcgcagtacccgaacccggcccaaaacctactcctttgcggtttattggatgatccttaccctggggccgctgctggcgggggccagcctggcgatcagctcctatctcctgtcgttacgctgggctagcgacctgaatagcgtgattgacgatgtgctgcgtatttttccgctcattttatcctgggtggcattctggctgctttacagcattgtgccgacggccgaggtgcgtaaccgcgatgcgataatcggttccctggtcgcggcgctgctctttgaggcgggtaagaaagcttttgctttatatatcaccgcgttcccgtcatatcagctgatttatggcgtgcttgccgtggtgcctattttgtttgtctgggtgtactggacgtggtgtatcgtcttgcttggcgctgaaattactgtcactctcggtgaataccgcaaactgaaaaaagaagaaacagaacaatcatgattgcattaattcaacgcgtatcccgagctagcgttaccgtggagggtgaagtgacgggcgaaatcggccccgggcttctggtgctgttaggcgtcgagagagacgatgatgagcaaaaggcgaaccgcctgtgcgagcgcgtgctgggataccgtatttttagcgatgctgaaggcaaaatgaatctgaacgtgcagcaggctggcggcagcgtgctggtggtttcgcagtttacgctggcagccgataccgaacgcgggatgcgtcctggtttttcgaaaggggctgcaccggataaagcggaagcgctgtacgagtatttcgttgagcgctgccgccagcagcaaatgaatacgcagaccgggagatttgctgccgatatgcaggtttctctggtgaatgatggtcccgtgaccttttggttgcaggtatgagccagcttccgggcaggctgcgggtaacaaaagagagtacagctatgtatcaccttcgtgtaccgcaaacagaagaagagttagagagctactaccagttccgctgggagatgctgcgtaagccgctgcatcagccgaaagggtccgagcgcgatgcgtgggatgcgatggcgcaccatcaaatggtggtcgatgaagagggcaatctggttgccgtcgggcggctgtatgtgaatgcggaaaacgaagcttctatccgttttatggccgtccatccgtcagtacaggataaagggctgggaaccctgatggcgatgacgctggagtccgtcgcccgtcaggaaggcgttaagcgcgtgacctgtagcgcccgcgaagatgcggtggagttcttcgctaagctcggttttgtgaaccagggcgaaatcacgacgccgacgaccacgccgatccgtcattttctgatgattaagccgatagcctcgctggacgatattttacatcgcggcgactggtgcgctcagctgcagcaggcctggtatcagcatatccctctcagcgagaaaatgggcgtgcgcattcagcagtataccgggcaaaagtttatcaccaccatgccggaagccggtaaccagaacccgcaccatacgctgttcgccggcagcctgttttctcaggcaacgttaaccggctgggggcttatctggctgatgctgcgcgagcggcatcttggcggcacaattattcttgccgatgcgcatatccgctacagtcagcctattagcggacgccccagcgccgttgccgatcttggctcgttaagcggcgatcttgaccggctggcgcgaggccgcaaagcgcgcgttcagctgcaggttgagctatttggcgacgagcggctgggcgcggtttttgagggtatctatattgttcttcccgcgaaaccgttcggcccctatgaagagggcggtaacgaagaggagtagcctcgctttacgcttatctatcggcctggtgttttaacccgccaggcgatatctctcatcgcgctgcctgccgccgggctgatgccgcccagctgaaagaagccgtgaatcaccccgagataacgctgacaggtgcagtcaacgccctgttcaagcaggcgctggtaaagcgcttcgccttcatcacgcagagggtcgtattccgcagtcagaatatgcaccggcggtaagccgtgaaagtctttacgccacagcgggctggcttccggatggtggagcgccgtcgcggcaaggtacatttcatagccgctgagcagggtatcttcggtgatgatgtaatctttaccgttatcgatatagctcttcatgctggcggtggcgtccagcatcgggtaaatcaaaaccagctgcgcgggttgccaggcctgcgccgttttgagccgcagggcggtcactaatgccaggtgtccaccggcgctgtcgccagccagcgtaatgcgggaagcgtcgatgcctaactgctccgcgcggcggtgaataatcagcgcgcctctctccgcatcgttatgggcggcagggaaagtatgctccggcgccagccggtattgcacggcgataacgcggcagccgctgtggtatgccagctggcggagctgatggtcatgcgtggcgaaaccgccgctgataaagcagccaccgtggaaatagataatggcaggcagtgcgccggaagcgttaaggggagagacaacgcgaaatgccatgccgtcgagctcgatatcttctacctgaacgcgcttttcctgttccccagccagtaccgtactggcgagatagccgcatctccggtcatcaatattctgttcgcgcgatgaggggcggcccgcattgataaattcccgcaccagctctgcgatacccttttcaagcgccattttttattcccttaagctgtttggatatacagtgttatagcctgattgtgagcaaaagaaaaccagggattttcgtcgggaagtgattctggaaagcggctcgcaaaaccaaagattttgccggcataccggggtgtttacgccattatcaatggtaagccgggcagcagcaggcgccgcccgacatgatgcctgccgttattccccttcgccagggaacaggaacggattgatggagctgcgggcgaagccctcttgttccatccgtgcgtccagtaccagcgaggcgaggtcgtcggctacggcctccacttttgggtctttttcctgatagagaatcttcaggtaggtaccgcagtcgccgcaggtttcggctttaatcgccgactgctcgttatccagtgaccagtagtgcagatcgcgcgtttgttcgcagttgctgcacttcacgcgcaccacgtgccattcagtttcgcacaggttgcagtgcagatagcgcaggccctgtgtggtaccaatttgcaccatgctggagaccggcatcgagccgcaaaccgggcagaactgacgctgttcaccatattcagcgcgggcctttccggggatcaggctggccatctgcgcccaatagagcgaaagcgcggcccagataaacggcgctttatcgctgctgacagaggcaaaatcggacgcaaacagcgcgcttgccatcagttccagctcctgctcggaggctttttccagattctcgatgaccgccagcgccgggccgctcatctccggcttcagttcggcaatcagagaatgcagcagcttgtgccagtgcttatcgcgcggcaaaacgtggatatccagcggcggtttaccctggtcgttcgcttctttgatgcgcgcggtgagatccatctgcagcggatggtcgtacagcaccacttcctgcgcgtgggcgataagcgcggcaaagcgcaggtaatcacccagcgggttattttcagccagttcgcgcaggcgttcggcgcgacggttatataaatttttgagccggggaaacaacaacggcgggatcatatccgtcgcgcgtttctcgctcttttccagctcatcttgcgggatgatacgaatgctcattcagtcacttcctggtttcagcagattcggcgatggtcgcgtccgctctgcgatttggcgggcatcatgcgcccgctctggtgatgtcattaatgataaccgcaatcggcatacgggatatagccacgacatcgcaatgtgtgcgctacgatacctgatatcgatacccccgactatgcaccgttaggattagctgccctgcgccatggcttgagcgaaacgggaaacgtgccgctcacgcctgcggcgcactctggctaacgttgtcaaaacagcgcgttatccgcaaaaaaatggcgtcgatatacgacgccatttcagagacgaacaacgcgctcgggcctacgactggcgcttatcctgcttttcgcggacttcacgataccagcgcgggtgatgtttcttcgcccaggtcttcgtgacccagccttccaccattgcggtaatggtgcccttcacccacagcgcagcgtaaatatgcaccatgatcactacaatcagcgccaccgcagagaaggagtgcagcatcagcgcgaagcggataaccgggatggagaaggccggcgcaaagtacggacgccagatgatcacgccgctcaccagcagcagcaccagcaagataatcgccgcccagaacacgcatttctggccgaagttatagcgcccggtgtcgcccacttcctcgttgacgacaatcttgcgaatatttttcgcccagaaaatatcgtcccggttgatcaggttgtggtgccagtagcggaagaacatgatgatgaacgaagcaaacataatcacgcccacgaacgggtgcagaatacgcgccagctgcggggtgcccatgatttgcatcagccagttgaaggacgggaagaaaaagcccagcccgctcaccgccgccagcacgaagcagaaggcggtgacccagtggttgattcgctccggcgcggtgtagcgcacgatggtgtcacgtcttttcatttgcgcacctcgtctttctcttcatccagattgtcctcttcctcttccgcgcggttcgggccgacgccgacgtagtggaagatgctggcggcgaaggtggccgcaaagccgaccgccgcgagaggcttccagatccctttccagaacttaaccgtggcgctgatttccgggttctccggcaggccgtggtacagattcggtttgtcggcgtggtgcagcacgtacatcacgtgcgtgccgccaacgcctgccggatcgtacaggcccgcgttgtcgtaaccgcgggttttcagctcggcgacgcgctcgcccgccagcgttttcatatcctctttggagccaaagtggatagcgccggtcgggcaggttttcacgcacgccggctcctggccaacgttaacgcggtccacgcacagcgtacatttgtagacgcggttatcttccgggttcaggcgcggcacgttgaacgggcagccggcgatgcagtagccgcagccgatgcactgctcggactggaagtcgacgatgccgttggcgtactgaatgattgccccttccgccgggcaggccttcaggcagcccgggtcggcgcagtgcatacagccatccttacggatgagccactccagtttgtcgttctgctccacttccgagaagcgcatcacggtccaggatttggcggtcagatcggcggggttatcgtacaccccgacgttgtgaccgacttcatcccggatgtcgttccactcggaacaggccacctggcaggctttacagccgatacaggtggtgacgtcgataagcttcgccacctcttcctgatggtcccgcgcgcggggcgcgggggtgaagccgttagtcgcggaacgacggataatgtcttgcgattgataagccataattcgtctccgttacgccttttccacgttcacgaggaaagccttgaactccggcgtctgcgtgttcgcatcaccgacaaacggcgtcagggtattggcgataaaccctttcttcgccacgccttcgtagccccagtgaatcggaataccgatagtatcgatatccttaccgtccgctttcagcgtgcgaatacgcttggtcaccaccgccttggctttgatatagccgcggttagaggagaccttcacggtatcgccatgggcgatgccgagcttgttcgccagcttctcgccgatctccacgaactgttccggctgcgcgatggcgttaagcagcgcgtgcttggtccagtagtggaagtgctcggtcaggcggtaagtggtaccgacgtaagggaatttctccgctttgcccatctgctcaaggtcgcctttaaagacgcgagcggccgggttagagaccacgttcgggtgcagcgggttggtgcccagcggcgtttcaaacggctcgtagtgttctgggaacggcccttccgccatcttatcgatagcgaacagacgccccatcccttccggctgcatgataaacggcccgacatcgctgtccggcgccgcggcgctgtagtctggaatatccacgccgccccacttcgcgccgtcccatttcaggagctggcgcttcggatcccacggtttaccctgcgggtccgcggaggcgcggttatacagaatgcggcggttaagcggccacgcccatgcccagcccagcgtattgccgaggcccgatggatcggcgttatcgcgacgcgccatctggttgccgtcaggcgtccagctaccggcgaagatccagcagccgctggaagttgtgccgtcgtcacgcagctgcgcaaacgagctgagctgctggcctttcttgacgatcaccgccccagttgccgggtcggtaatatctgccagcgccttgccgttgctctccatcgctacttcttccgacgctggttcatgcggcgtggcgtagttccacgtcatgttcagcaccggttccggcgccggtccgccctgttcggcgtacatcttgcgcaggcgtaagaagataccggcgaggatctcaccgtcggtggtcgcaatccccggggcgtccgcgcctttccagtgccactgcagccagcggccggagttaacgatagaaccgttctcttcggcgaagcaggtggacggcaggcggaacacttcggtctggattttcgccggatcgacgtcgttcgactccccgtgattttgccagaaggtggaggtttcggtgttgagcgggtcgatggtcaccaggaacttaagcttcgacagcgacgcgacaaccttgtttttgttcgggaacgacgctaccgggttgaagccctggcagatatagccgttcactttgccctggttcatcatctcgaaatattgcaggacgtcgtagcccttatcccacttcggtagccagtcaaagccccagctgttttccgccgtggctttatcgccaaagaaggccttcatcatagagacgaagaatttcgggtaattaccccagtagttcacctggtccttcaacagcggtttcggcgtgttggcggcgagataggtttgcaggtcagtctgtttctcgctcggcagcgtcatatagccaggcaggctctgcgacagcagccccaggtcggtaagaccctgaatattggagtggccgcgcagggcgtttacgccgccgcccgccatgcccatattgccgagcagcagctggatcatcgccatggtgcggatgttctgcgcgccgatggagtgctgcgtccagcccagcgcgtagaggaacgaggcggttttatcgtgcgcgctggtttccgcgatgtactcgcagactttgaggaagtcggcttttggcgttccgcagatgttttcgacaacttccggcgtatagcgggaaacgtgctgcttcagcaggttccagacgcagcgcggatgctgcagcgtggtatcgcgtttggcaaagccgttctcatccagctcatagttccaggacgttttatcgtacttgcgtgcttcggcgtcgtagccgctgaacagaccgtcttcaaagctgtaatcctcacgcacgatcaggctggcgttggtgtaagcctcggtatattcacggttaattttttcgttgttcaacaggtacaggatgacgcctgacaggaaggtaatgtcagtaccggaacgaattggggtatagaaatcagctaccgccgcggtacgcgtaaagcgcggatcgatcacaatcagcttcgcgccgttgcgaatcttggcttccatcgcccagcggaatccaaccgggtgagcttcagcggcgttgccgcccatcaccacgacgagattggcgttcttgatgtcgacccagtggttggtcatcgcaccgcgaccaaatgttggagcaagacttgctaccgttggtccgtgtcagacgcgcgcctggttgtcgaccgcgagcataccgagcgcgcgggtaaatttctgggttaaataaccggtttcgttactggaggcggaggcgcacagcataccggtggtcagccagcggttgacggtggtgccttcgctattctgcgcgacaaagttggcgtcgcggtcctctttcatcagcttagcgatgcgatcgaacgcttcatcccagctgattttctgccatttatcagagcctggcgcacggtattccggaaatttcaggcgactttcggaatggataaagtccaccagaccggcccctttagggcagagcgcgccacggttgaccggatggtccgggtcaccttcgatatggaagatagacgctttggcattttttgcgccgtcgccgaggctgtacattaacagcccgcagccaacggaacagtaagtgcaggtgttacgggtttcgcgggtgcgcagcagcttgtactgccgtgtttccgcgagcgctaaaccgggcgcaaagcccagcgccgctgccgtggttcctgccataccgccagcgcagatcttaaagaactgccttctgctgacctgcatggttcgctccttgtttcgacattgtcacgtatagttatttgctttgcggtaagggccgcaaaggttcagaattgggggtaatttccctcgttcccgaagggatataaacagaataccacattgtgtgtatgcctgttccaatacggttaagacaaagtgaacaagaagcctcttgaacaaatcgaaaatgtgacagatatcacaggttatcgccaggtatcgctctggaagcgccaaaatttgcaacatcctcagccagacgagttagctgaagaggtacccgttgcgctggtttataatggcatctcgcacgtggtgatgatggcgacgccgaaagacctgatgcagttcgccgtcggcttttccttatccgaagggattatcgaaaaccggggcgagatttatggtatggacgtcgttcaggcctgtaacggcctggaagtgcaaatcgaactctccagccgccgcttcatggggctgaaagagcgccgtcgcgcgctggccggacgcaccggctgcggcgtatgcggcgttgagcagctcaacgatatcgggaagcccgtgcagccgctgccctttacccagacgttcgatctggcgaatctcgatcgcgcgctggcgcacctgcatgattttcagccgataggccgccttaccggctgtactcacgccgcggcctgggtaagtccttccggcgagctcgcgggcggccatgaagacgtgggtcgccacgtggcgctggacaagctcctgggacaccgcgcggaatcagaaggcgcctggcagaacggcgcggcgctggtctccagccgcgccagctatgaaatggtgcagaaggcggccatgtgcggggtggaaatcctctttgcggtctctgccgcgactacgctggcggttgacgtcgccgggcgctgcaacctgacgctggtgggattctgcaagccgggcagggcgaccgtttacacgcatccgcagcggttaatcgcgggttaaatttaagtcagtttttttgaatgatgacaacaaatccttccgctttttgtttggcgatgtgagggctactatttatcacatcaaggcacggcgccttattcaaacaactaacgtaaagggtttatatcatgaaaagcatcaaaacttttgtcgcagttatcgctctggccgcttcttttggttctttcgctgcggaaaccgtgaccgcgaccgccgcaacgatggacggtgcggaagcgaaaatcgccgctcaggcccaggccgctggcgcttcatcttacaaaattaccgaagcgtttaccggtaaccgcgtgcacatgactgcggaactgaataaataagcgtaaagctactgtcgaaagagcgcccagggggcgctttttttgtgtctgagatttattcccggggggcttaacgcaggtgcctttgccgtgaggggcggcgatatcagaatcaaaacaggctgaatgcagctttacgcgttggtccctgcaagaaggcagacaacagatgagaaagccgtgaaccttcctgacgcaaaaaaatgcgctatttatcacatttctgctttttcatcatcgctgagtttatgggagaaaacaggcagcccacccgcgcaattatcgcttcaagcaacttaatgatcttaaagaaaataaaaagataattgttaagacgatctcattttataaaagagatatgcatcacaaaaaatgaggaaataaacccactgtcaatattaggctcggaggaatttatcagcatattgtgatctctattgcaaataacggtcttgaactcagggaaaaatgtgggcaagcaaagcaacggagacaggcaatgaaaattggcatggttattagcggcggcgatgtttctggaattaataattttatattccagatagccagactggcgagtgccgatatcaccctttttaatggcggaatacccggactgctggataaaaatcatcacgaggtcgcctggcgcgatctggttgatttctccattgcctctattccgatcatcacctccgggcgaaccagccgcaggctgctgcgcagtgaatatgaaaccatagctaaaaaaattaaatcactgcgcattgatgtgctgattatggccggcggcgacggcagcctgcagtttctcaatacgctgagcgaatttgatattaactgctttggcgtcgggatgactatcgataatgatgtgtacggcagcgattataccattggtttttccaccgcctgcgagcagattattaaggaagtttcccggttaagaaataccggaagagcattaccgggccgcgtctttatggtcgaaatattaggaggctattgtggagagttaacgctgcaatccgcgattaaatcgaatgctgatatcgccctgattccggaatcgcagatgccgttagaaacgctggccgagcgggtgaagcataagctgacacagcagaacagcgtggtgatcctgtgctctgaaggctacaccagggagtattctcccggctttcagggggccattgataccatgattaagcagcttgaaccgcaaattggcgtgcgtattcgtaaaaccatcgtaggctacggtttgcgcaatggcgatccgacctgcgaagaaatttaccagggcacgattatggccagtgaagtggttcgctgtattcagtcagggatgaaaaataaagccatcataattaattcaagcaacaaacctattccgattgatttagttagtatgaaaaaacgtctggtcgacactgaaggacatcattataaacttgccaaacaactcaatattatttgaggagaccctacatgctgaaaattctatgcgtatgtggctgcggcctcggttcaagctttgccattgaaatgacggcgaaggcggttttaaagaagctggagattcccgcacagattgaacataccactatttccgaagccggggcgtttaaatcagatatgattctgacgcaaaaaaccttcgccgatatattaacggcggatgccagcgcggaggaaattaaacgcgtggtggtactgcataagctcacggataaagatgagattgaagctaagatcgtcgcattcttaaaagagcgtaacctgaaggtagcggactatgaatagctttgtagagtttatcgttaaagatttactcggccaggcttcaatattaattgcatttattgcgatgctgggcctcattctgcaaaaaaaatcagcgggcaaaacggcggaggggacgtttaaaacgctgctcggtttcttaattatgatggccggcatcaacattattgtcgccacgctaacgttccttaacgatatcttcacgcagggattcggcatgaaaggctacattaccgatgtcgccgccatcgccggattagccaaccgtgaattaggttccgaagtcgcgctgaccctgatggtgatttttgccgtcaacatcattatcgcccgcctgacgccgctgaaatatatctttctgaccggccaggcgctgctgtggatggcgaccatcggcgcggtgattggctataaagccgggctgaccggactgccgttgattttaaccggcggtattttcggcggcgtgatggcggtactgatgcccgccctggcgcagccggtcgtcaggcgcatcaccggttccgatgacgtggcgctggggcatttctgcactatcggctatctggtgcaggcggcggtggctaaagtggtgggtaaaggttcccgctcaacggaagatcttgaattaccggataactttaagttcctccaggacacctatctcgcgatggcggtggtgatggtgccgatgtatctcattcccgcggttgcggcgggcccggaatatatcgctcagttctccaacggcattaactacctgatgtacgcctttatgcagtccattcagtttgtggcgggagtattcgttctctacagcggcgtgcgcctgttgctcaacgagctggtgccggcatttcgcgggattgcgatgcgcattgtcccggacgctaagcctgcgctcgattgcccggtgctgttcccgtatgcgcccaatgcggtgatcgtcggcttcctggcgacgaccgtcggctccatcatcggcatgctggtgttcccgatgtttggcctggcgatgatcctgcccggtctgttaaccaacttttttgccggcggtacggcgggcgtcttcggtaacgcgctgggcggccgccgcggggcgatgattggcggcgtcattcacggcctgtttatcaccttcctgcccgccattttggtaccgatgctggaaagctacggttttaccggcgtcaccttcagcgattcggacgtgattagttccggtctggtattaggccacgccttccagaacaactggctttttgtcgccttgttcattgtttttgttgccgcactggcatggttcgtaaacggtaaatcagcgaagccgaaaggggaaaatgttcatgagtctgtataacttcaacgctattctgaaaattgcgcaggaaagagattttaaagccattggctcatttaatttgcactgtattgaaatgctgcccgccttttttaaagcggcgcaacaaagcgatagcccattaatgattcaaatctctaccgggacggcggaatatctcggctatcgtttactggtggatgcggttcgttcattagcggaaagtgaaaacgtgccgacctgcctgcacctggatcactgctctgatatcagcgccattgaaacggccatggatgccggattttcatcggtgatgtacgacggctcccatctggatctggaagagaatattggcaatacccgcatcgtggtggaaatggcgcgcccgcggaatatcacggtagaaggcgagctgggggcgatcggcggatcggaagatggcaaagccgtggccgcggaggatatctgcttcaccacggtggaggacgccaaacgctttgtggaggagacgcaggtggatatgctggcggtctccgtgggcacggtgcacggcctgtataccggtaaggcgcaaattcagcaccagcggctgaaagagattagcgccgcgaccggcgtgccgttagtgctgcacggcggcaccggcgtcagcgatgaagatatgcgcctggccgtcactgaaggtatcaacaaggtgaacgtcggcactgaaatgaatgtgcagtgggtcgatcaatgtaaaagcacgtttgaaaaaggcaaagtgaacgacagcgtgcgcaaatttttaattccggcgaataacgcggtcacccatgtattaatggaaaaaatcgctctgtttaaataaacgcatatttttaaaccgtattccgttgccctgctgtccgtcggggaggagctcgctatgtttgaatctttgaaaacgctgtggaaaaaagagaatcaacccccgcaggattatgacgaacagtctcgccagctggcgggggaaattgccaggctggaaggcgagttacggggcaacccggctaatggcgaagtgcagaaagcattaatgctgatatataaccgggcgctgtcggtctatgccaaaagtcatacgcatcgcgaggaaatcgatgcgctttttatgcgcattgatgagttacgtaacattattcgccataatatataggaagtgataatgacgataaaagaactgctgattgaggccgatgctattcaggtcggcgtcacggagtccgactggcagaaggtgatccagctggcggccagcccgctggttgcaaaaggctatatctcggcagattacggccaggcggtgatcgataataccctgcatcatggcgcctattacgtgtttgatgaaggtgtcgccatccctcacgccaggccggaatgtggcgtcaaacgcaactgcttcagccttgtggtgttgaataagccgattcaatttgccgatagcgagaaggcggatatcgtcattatgttcggcgcgcaggacagcaatgcccatattgaagaggggattcgggcgattgtcgctctgcttgataataacgagaccatggcgaagctgcgggccgccagcagcagagaggaggtcgtcgcgttgttatgaacagacatctcacacccggctgcaaaacggtgattttaattaacggcattcccgcatcgggtaaaagcaccgtcacccggcagctatcggcagcgtttaatctgccgcacctgaccatagacggtattaaagagccgtttatggcgtgctttaccgggatcgaccggaccttcaaccggcagctgggctgcgccgcgtatgaagtcatctggtcgatcgtcggccagtcgccggcaggctgtatctggctcattgacgcctggtttggctttcaaccgcgcgacacgctacagcagctgctgcaacgcgcgggcgtagagaaagtgctggaggtctggaaccacatctcgcctgagcttgcggtgtcgcgctatgccagccggttgcaggatcgtaagccggggcacccgggcgaggagtatcttccggaactggcgcagctggcgcagcaggcggaaccgatgcggctggggccggtgtttaccgtggatcagcacaagccgctggatatggtgtccgctacccgttggattgaagcacaaatagcgtaagcccttaagggcagctgcccggcggcgcttcgctggcacggcctacaattgcataacaatatgatgtttcgcgtttcgtaggccggatcaggcgacgcccgccatccgcagcagcgccgtcgccacggcggcggcgataatcaccacgatcagcggcattttacgccaggcgaggaacaccgccaggcccacgcccagcacccgcgccatcccggcaaaatgttcgccttcgtaaaaggtggtcgccagcgccacggaaaagagcagcaccgtcgccgcatcggagagcagggcctgggcgcgctcggaaaacgccagccggctgccgagcttcgccccgcctaaacgcattaagtaggtgcccagcgacagaatcgcaataccggcgataaatagcgtcatattgcccattattttttcctcgtcagcaggccaaacagcgacagcaaaaccggcaggccaaccggtgcgaaaggaacggcggccagcgacagggccgctccgctgcaggcgcggatcagggtggtgcggtttttaaaggccggcaccaccagcgccagcagaatcgccgggaataccgcatcgaggccaatggtttccggggccgggagcagtttgccgacccccgcgcccaggagcgcccccaacggccagatcagcgccacgcccaggccgcacagccagtaggcggcccgccgctgctcgggggttttctgcgacagaccaaacaccacgctttcatcgttcataatatggcagccgaggaagctggcggcgcgctggccgaccaggtcgcgaaccgtcacgccgaagggaatatgccgcgcgttgaccagcaaaccggccgccgctgccgccagcgggttgccgccgctggcgacaatgccgataaacataaactctgaggctcccgccaggacgcaaaccgaaagcacaaaggggacccaaatcgggaagccgtaggcgacggccagcgaaccgtaggacatcccgacgatgcctaccgcgaggcagactaaaacaattgctctgagggtgtcgcctttaagcgtggcgaagtgttgtttcatactctttagccatatcgaacgaatttccattataatgaacgcaacagaatcgcatttcaagacgaacgaaacgttcgttataaaaaacacggagggctgtatgactcagccaattagcctgattgccaaaagcctggtgcgggaacgcgcgcgcaccggtctttcccttgccgaagttgcgcgacgggcgggaatcgccaaatcaacgttatcgcagctggagtccggcaacggtaacccgagcctggaaaccctctgggcgctgtgcgtggccctcgatattccctttgcccggctgctggagccgcaggtgaataccacccaggtgatccgccgcggcgagggaacgaaagtgatcgccgagcaggcaaactatcaggcgattttactggccgcctgcccgccgggcgcgcggcgcgatatctatctcctgctgacccagccgggcgcggaccgcatttcccaccctcatccgccgggttcggtggagcatattattgtcacccagggacgcgcgcgcgtcggcctgacggaagcgccggaagagctgggggagggagattacatctgctatcccgccgatcgggagcacgttttccaggcgctggagccggatacccaggcgctgctggtcgccgagcagaactagtcaggcccgacactgggccttcggtgtgccaaaaacaggcgtcagataaaagggattgtcaggcgcgcgcgttatgattgatatcgccatcggccgttttttgcagggcaatagcgatagggcaggagaggtcgagctgccggggatgatagccgcgctgcagcagccagaaccactcgcctccggccgctggctccagccccatatcggtaaaacctgctcgccgcagcctgggtcgtagcgacatcagcgcgccatccacgcgcgcccggatataaatcagtttacgggccggcaggcgggaaatctcgtcgaccatctgttgcgttgatatattcatcgtgacgtccacccgatcatcacaaatggcaatttcaacgggggctgcacaagtttccctggcgggcgggatctgcgccgcgccaaatttttcctttagcaagtttatccaaccatcatcacggctatcatccgcggtgagcgggacggggcgtggctgcaagggtaatacgccgaggataatgctttcacgcaggccggattgaaagggggaggggacgtaatctctgagcaaccccgttgagtaaaagcccagcctctgcgccaggcgctgcgagtgtggatggctggataccattttgatggttagcgtgcccaggccaagcctgcttgcggcaagacgcaaatattcccccagttgggtggctacgccccggtttctgaaggcggggtgcaccgcgaacatggccagttcggccgtctgcttatccgcgtggtgccgccataaggcggcatgcccgatgatgatgccattctgttcggctatcgcgctgtgccattcgtcccgggcgttgcgccagccaatcaggctgggcatatagatatcaggatagacatagcgatcgccgtaaaccgtgcgaaataaggcgctgataccttcgccgtcttgtcgctggaacactctgatttcaatcatttcaccgcctcctgcgcgaggtaggcgcgtttgtcgatcacccgctgcagcttacctgttcgggtattgcggataagttccgcctggctgcaccagtgaacctgaacgcacagctggccggcagcctgtagttctgcgagagcgtgatccctggcgagtaattgaccgcagagcctgtcggcctgctgccgggtaccggaaaaggcgatacgtaagctcaaacgatcccggttatcggcgtgctccagcatcagctgccactgctgatgccccatctcttccgtaataagggccgctatttcatcaggaaacagcgaggcgtaacctacccgcaagcggtacccgaggctactgcgtccctgcaaaataaacttgcgatgtttgcttcccggaggttcacgccaggcggccaaatcgcctaccggatagcgaatcagcggcatcagcgtgcgcgtaaggctggtgaccaccagcattccggaacgattgatttcgtcgatcggctcgcccgtcgcttcatcaataatttccacgatagtttcgggttcaaagacccgatgctcgtccgccaggcaatccggcgtgctgagtccgataagcccggcatccacgcaggcgcagccgatagaagcaatacgggcgttgggaaaggcggatttcagcagctgtagctgttcagtaaaaagactctcgctgccgtaaaggatggtctcgataccgggcagacggcggttttttccagcgagctctgccgcatattgcagcagcatcgccgggacgcccaccagtacgttgatatcgtgctggacgatctgttcggtgagggtctgcggttcaagcgatccggtgaaagggtactcacataccggtatcgacatgtgcgaaagcgcgccgtggataaataagaagctcgcgtacaaatcaccggcgaaaaataaatttgccacgcgcgcgcctggcttgagctggctggagaggctgcggccaaaactggtgacgaacgcacgccactcctggcgggaaaaaaccgacagcttgccgccgccggtggtaccgccggtcttaaagacaataccgtcctccaccggcccggtgaggacgggccagtttttcaggccctggctcccctcccagtagcgttcgggattaataagcggcaggtccttcagctgccagccgcgggtggcgagatggcgatagtgttcggcatagaaaggcgagcggcagcgaaccctctcgacaagctgttcgagacccggtgggcttacggccacttcttccgtttgggtggattgcggatcaaggcgacccatcatctttgctgttgtcatattcaaatatccttattgtgagccgatcggcgggagtgcgctcaacggcgtttatcaatgaccagcggcgtcttgccgctttgcggatgccgttcaaattcgctgaacgggcggctggtcacggctaactccagcaaatgggcgtccaatgccattttgagctcagggtcggtgcagacccgctgtttgacggtatcaatattgccgtcggtgaagatgttgatgcattcgagcccgctgcgcgggttatgttgaagaatcaattgaacaggggcagcggcgagcgttgccagccgctggggctgaataaacatcgtgccgatacgcaccaggctgccgtggcgacctaaaagttcaaagcgggggctgggggcgccgcaggggcattcgcccggcagccaacggcccatatcgccgatgtcataacgaataaccttctgaccttcgcgggccgtcgaggtaaagagcaggcggccggcatcgccgggcgcgacgggccgatcgtcgagcgggtcgacaatctccagccattgaatatccgtcatcaggtgaaacacgccatccgggcaatgcgtacaggcatgtcccagcggcccggcatcaaccgaaccatacagcgccgagcgaatggttttcaccccgaaaccatgaatatagtcacgctgggcgacgcccatatgttcgccgcccagcagcagtttctgaataccgccgtagtcgcgcagaatggcctcttctcgcgtaaagagctgatacagcgtgcttggcataccaatgagcgtggtaacgccctgattcacaatagttcgggcgatctcgtgatagtcatcatcatgggggccgcccatgggaagatgggtcacttcaagcatttccagtagggtgaagaagctgagtaaaccaccgtagagattgcccgcgtacatcagattgagcactttgtcgtgggcgggatccagcccggcggcgaacatgcctgcggcggcggcctgcatctggcggcgatagtcgcgataggtaaacccggcgagtttaggcacgccgctgctgccgccgctgcgaaagaaaagctgggcgctgggccgcatcgcgtgctgtaagaatgccgttttatccataatcggctgctgcgccgtcagcatcggcggcggcgggttcggatcgagcgtggcctgctgcggcaggacatcggcatccagcgtcacggtgacgcgacgagccagctggcttaaggcgtaaacgccgtcatgcggttcgccgtgatagccgtcatgcattttaccgacgggggtaattcgattgacgccggctgccagcagcagttggctgagggggattctgtcccgatcggcgacaaccagcccgcaggtttgcaggtgggttcgccaggggcgcagcgtttgcatcactttattttgcggtagcggccgcagcaggacggttcggaacagcggtgaaggcgttatggccgaggtgtgttgctgaatgatgcgccagccgtctcctgccagcagagcgttgtcagccccggcaaatacggcgtccagctgcgcgaaggcgacggcgcgggtgatatccgccgccgccttttcatcgggcattaacggttgccaccgtgcgtgacggcgccgcatggcctctgccagtcttccgccaatatcctgcaataccgccgaatcatcgctatcaacaaaaacgatttgcgggctggaacaggcctgctggtcaaaacagcaaacgtcatccgccagcgcgagaaggctttcttcattaacggcatccggttgtagccaggcaaagctgattttatgtccccaggggatccagcgacacccgccagggagctgttgacgaatcgcctcgagggcggtatcgccaccccaggccgatataccatcggcgtgggtaagcagcagggaaaggcgcgtggtttcgacgggaaccacggcgacgaagttagccagctggtcagttaaatcgcagcggataaacgcccgtagcagatcgattgtcattccttgttcgctggcgcttgggcgcagccagttaatattcccgaccagcaggctctctattattgcgaagaagggaagcagttccgcattggctggggtgacatgcaccacgacgcccaaaggacgccagccttcaaactgcggttcacggtagttaatgcggcgcacggaaaaggggttatcccccagctcatgctcgagcttttggcgcagcgcgtcaggttggcaaaactttctcacctcttcccgataagccgggcccagttggggaaggaaagcgtggtcttttagctgttcgataaaacgcccggcgcaggcaagcacggtttccggacgcggcggttggcccagcgcgctatccagcccgctcgtcaacatggcgatggcctcttctggcgtgagcgaggaatagttttttccctgaatgaaatacatattaatttcccttaatcagttctgacgccgccagtgcgcagctacgtgctttgctatggctggcccggcccagcagctcaaaccaatcggttgccacaccgcatccgcactcttcggcgcggtgcaattgtgctagatcgctcatgaccacgctgtgcgcagggcaggaggtgatataaggcgacacaaactgtataaaaccgcgctgcccataatctttcaccgccagagaggcggtatcgcggatccaggcgcgggaataaacgggaatatggaaatggtgatgcgcgcattcaatgtagggcacgcagtgctccacggaaccatagccgtcgcggcatcggctatcggggatcccgagctgttgggtcagccgcgcatagaacgcggatttagggatttcacggtcggcatgcgttttccagccgccgccgaaaaaggccagcgattgatgatgaagctggagcggcggtagctgcatttctcgcatccgttcaagtatgaaccacataaatgccgggaaacccaggattcgtaccggtaacccctcttcagcaaactcctgtaaagcgcgaatcacgccgaaagggtcgaactcatgcccgctcccggtgtgacgcagcgcgtaaacggcgcgtttgaccggcgcgtatttacacaagaactggtcggtaaaagaggtgccaagcgtgatgatatcggcgggttcgtagctgaggagcaggtagttgcagggcgcatcgggcgtttcccagccataatggcggaaaatgcgatcgaccattccctgggcggctccgatactgcgcgcatcatagcgcattcgacttttctgcccgctggtaccggaagaggtgagttcaagcgcatcctcaccggagcggccgatcggcagattctgtttgaagtagtcggcaaagatcggcggcagctgcgaccacgagtctatattggccgcatctgccggaatattgtggcgggccagccactggcggtagcccggcgtattcataacatgaaatgcaacgatttcacgcatggcttcatcaaagagccgttgtgaatcgctatcttcatgataagggctgtcgagtgcgcagagggcatcgacgcaggataaagtgtccattttattaatccttaataaaaagtcgtccgtgagtgattaatggcctgaagctgttattttcgttttactcctcttctgccgggtgaatatattaacgataatgaataatgctgccagcatcggaatagtggccgcgataatatatgcgctgaggctgtcgccggcgcccaatccggccattagcgcccccccgaggctaaaaatagcgacggaaatcatgcctatcattgccgatactgaaccttttccatgctcgctggaaaatagcgtgaggcgatacagcgtggcgttgcaaatgcccaggccaaaagcataaatagccatgccgataatcagcgcaataatattttgccatattagcgtcatgaccagcgccagcattatgccgataaatacgggagacagtgaaaagtataataactgctccggcttaaatttttcagcggtaacgttaaggacgatattccccgcaatcaacgcaccaaaaataggtaattgccatagcgcgtactccagcatgctcatttttagatgatgcaccagcagcagcggggagagcgcgatccacgccatcagcggcagcccgacgaggccaagcgcaacgctgccggatatacagcgtgggttcgtaagcaaatcgccataagcgcgcgcgagggtttttacctcgagcggctgacattcaattttactgccatcctggcgtacgacgccgatcgtctccggcatccagcgtagcaaaccgaaccaggtgagcgccgccatcagcgcgatagcaataaaaagcgtgcgccatgacaggtatgcaagcacaacgctaccgaccaaagggccaaacagcggcgacagcagcgcgatattggcaaacagggcaattaagcggatcgcatccgattcgttgaatgcttcctgcagggccggatagctcaccaccaccacaaaccccaaacctattccctgaataaaccgcaggagagtaaaaacctggatattgtctacccatggcgtggccaggcaggaaacagaaaaaagcgcacagccgatgagtaataaaggcctgcggccaaatctatccgacgccggtccaataagccactgaaagctgacgccgccaagtaaataggcattaagtgaccacggtacgtaatgcggttgagcatttaagtctttaataaccgttagcattcccggcattactacatcgctggcgacataagttaacagctcgaatgttgaaagaaataaacagaaaaataaagcgtgccgtgaagaaacaggcagtagtgagttatacataaaaccctgttattaacatattccattatttagcttttatatcactccctctttttaaaaacttttatcaagtgattcttagttgataaatatcaatgaacagaccgtgttcatgtttgttttaactgcgaattataattccgatacatacttcatattttaattaaaaataaatcgaatgatttatggggattaaatgtacgttttccagacgctgcgttatttttccagggttgagcgattaactcattcatctatcaaccatatgatttgtatagggtaaacctgtcggattcaaatatattcagcttggtgaattacagcgcatcttcgtctctttcttatggggaagggggcgtttaatttaccgccacattgaataaacggtcttgctgcctctcatttcgttgtgacgtatcatcaggcgccgagggccgcggtgttcaggtattgccgcgcggcgtcgctcttgctggacgccatgcccgtattgcgggacactagccgcattctcccgcgaagacagggatacttatgtcgctgaaagccattgctaaagaacttgggatctcggtaacgaccgtcagccgtgcgctaaacggctatgatgacgtgtcgcaggagacgcgcgcccgcgtggaggccgaagctcagcgccgtggatatcggccaaatactttcgcccgccgcctgaaaatgggcaaaatcgacgccgttggcctcgttttccccgtgcgtcccgcgccgttgaataacaacgtctttctcgaaatggtgggagaaatcagtcacgagctggcgcgctatgagattgatttactgctgattgccgacgatgaacaggccgataagcacggctatatgcgtatggtgcagagtcgtcgcgtcgatgcgctgatcgtggcccatactctggacgacgacccgcgcctgattcagctgctctcttccggctttccttttctcgccctggggcgcagccgcctgccgcagccctacgcctggtttgatttcgataaccaggcgggaacgtaccgcgccacccgtcatctgattagccaggggcatcagcgcatcgcgctgctgagcgaaaataacaatcaggcgtttattacccagcgccgcaacggttacctgcaggcgctgcgcgaagcgggcctggcggaaacctggctgcgcagcgtaccgcccacccgccgcggcgggtttcaggcaacgatggaactgctgcgcttgcctgaaccgccaacggcgattgtcaccgattgcaacacccacggcgacggcgcggcgatggctctggctcagctcggacgcctcaccggcgccgatcgcgtctcgctggtggtttacgacggcttgccgcaggacagcatcatcgaaaccccggtgggcgcggtggttcagtccacccggcagggcgtgggccgccagattgccaccatggtccgccgcttaatcgccggcgaggatctggcctctctccaggtgctctggcagcctgaatttattcctggcgaaaccgcctgattcccttcccgtcagattaatttcctgaactcgatcacggatccgaaacgttttggttggaacccgaaacgtttcggatcaacagtaaggcattccttgttgtggagatgtctcatgtctgattcgattttacgtctgcaaagcgcagcggctgatgtggtgatcaaaacccgtccgttcgccgaaattatctactgggggccgcatttaagccactttacgccgcaggatgcggccagcatcgcccgcccggtggccaatggccgcctcgacgtcgattccccggtgaccttaatggccgaactgggccacggcctgtttggtgcgccgggcattgaaggccaccgccaggggctggatgcctcaccgatgtttaccacgaccgaggtggtgcaggatgggcagaatttaacccttctcagcgaagacgcgcaggcgggcctgcggctgtgcagtgaaattcagcttgatagcagcggcgtgctcagcgttcgtcatggtttaaccaacctgcgcccgcagccgtggcaggtggaccgcctggcggtcacgctgccggtcgccgagcgcgcccgcgaagtcatggcctttcatggccgctggatccgcgaatttcagccccatcgtctgacccttgaacacgacagctttgtgctggaaaaccgtcgtggacgcacttctcacgaacattttccggcgctgattaccggcagccgcgcttttagcgagatgcagggcgaagtgtggggcgtgcatctgggctggagcggtaaccaccgcctgcgggcggaagtgaaaaccgacggtcgccgctatctgcaggcggaagcgctctatctggcgggagaaatggcgctggcggaaggggaaacgctgtggacgccgaacctctacgccagctattcggcgcaggggctgaacggcatgagccagcagttccaccgctatctgcgcgaacagattattcgcttcccggacaacaaaccgcgtccggtgcatctcaatacctgggaagggatctatttcgaccacgacccgcagtacatcatgcgcatggcggatgaggcggcggagctgggcgtggagcgctttatcattgatgacggctggtttaaagggcgcaacgacgactgggcggcgctcggcgactggtatcttgatgagaaaaaatatcctgacggtctgacgccggttatcgaccacgtgaagtcgctggggatggagttcggcatttgggttgagccagagatgatcaacccgaactccgatctctaccgcgcccatcccgactggctgctggcgctgccgggctatacgccgatccccgggcgtcatcagtttgtcctgaacctgaatatccccgaagcctttgattatctgctggaacggatgagctggctgctgggcgagcacgcggtggactatgtgaagtgggatatgaatcgcgagctggtgcagcctgcccataacggcaaagccgccgccgatgcgcaaactcgtcagttctatcgcctgctggatacgctggtggcccgcttcccgcatattgaatttgaatcctgctcctccggcggcgggcgtatcgattatgaagtgctgaagcgcagccatcgtttctgggcttccgacaataacgatgcccttgagcgcaacaccatccagcgcggcatgagctacttcttcccgccggaagtgatgggcgcgcacattggcaaccgccgctgccacgccaccttccgccagcacagcattgcgtttcgcggcctgacggcgctgttcggtcatatggggcttgagctggacccggtgaccgccgatgagcaggagcgcgcgggctattgcaaatacgcggcgctgcataagcagtggcgcgatgtcattcatcacggcgtgcagtggcgtatcgatatgccggacgccacaaccctcgcgcacggcgtggtgagcgaggatcggcatcgggcgattttcctcgtcagccagctggcgatgccggactacaccctgatggcgccgctgcgcgtggcggggctggaagcgggcgcccgttacgaggtgacgctgctcgaccatcccgatattcagattacgggagagggcggccataccatgcgtaagctgccggaatggatgacgacgccgcagaccgtcagcggtgagtggttgcaacaggcggggctggcgctgccagtcctcgatccggaaagcgccattttgattggcctgcaacgcgtgtgatgacgatgggccgcgcgtcggccctttttgaggaatacaccatgaacccgaccgtctgtacccataaaaacaaccccaatttctggattttcgggctgttcttctttctctactttttcatcatggccacctgttttccgtttttgccgatctggctatcggacgtcatcggcctgaataaaaccgagaccggcattgttttctccagcctgtcgctgtttgccatctgttttcagccgatactgggcgtgatctccgataagctggggctgaaaaagcatctgatgtggattgtgacggtgctgctggtgctgatcgcgccctttttcctctacgtttttgcgccgctgctgaaaaccaatatctggctcggcgcgctgagcggcggggcctacatcggctttgtgttctctgccggcgccggggcaatggaagcctatattgaacgcgtgagccgcaacagcgggtttgagtacggcaaagcgcggacttttggctgcctcggctgggcgctgtgcgccaccacggcggggatgctgttcagcgttaaccccgagtgggtgttctggatggggtcggccgccgcgctggtactggtcgtgctggtggccattgcgaaaccgcaggccagccagaccgcacaggtgatggattctttaggtgcaaatcgcccggcggtggatttaaaaactgccgtgggcatgttccgccagcgcaaaatgtggatgtttattctgtacgtcatcggcgtcgcctgcgtctatgacgttttcgatcagcagttcgccaccttctttaaatccttctttgctaccccggaatcgggcacccgcgccttcggttttgcgaccaccgccggggaaatatgcaacgcgattattatgttcagctcgccgtggattattaaccgcatcggcgcgaagaataccctgctgattgccggcatggtgatggcggcacggatgatcgggtcatcgttcgccacgacggccgctgaagtggtggcgctgaaaatgctccatgcgctggaagtcccgttcctgctggtaggcgcgtttaaatatattaccggcgtgtttgacgttcgcctgtcggcgacgatttacctggttggcttccagttttccaaacaggtggcggcgatcttcctctccgcatttgccgggaatatgtatgaccgtatcggtttccaggatacctatatgatccttggcggcattgcgctgagcgtcacgctaatctccgcctttaccttatcgggtaaggcaacgtcggaaaagatgagcgatagcgcgatgacggtttagaaaacagtccgataattcacaaggatgtgattgataaatgaggaaatattgaccatggatatgaaggaaagaatgaacagcggcgagctttatcttgattcaggatatgggttaccgcagcagcggctgatgggcaaggcgcgagcttacgaatacaaccactcgcacccctttaatcaggaattaagaaacgacattattcagcggatgttcgccgccgtgggcgagcagtgctggatagagcctccgattcatgtggcctacggcacccacaccaccattggcgataatttttacgcgaacttcaacctgacgctggttgatgatgccgacattatcatcggcaataacgtgatgtttgcgcccaacgtgaccatttccaccgccggccatccgattcatccggatctgcgccatacccagcagcagttctctcagccggtgataattgaagacggcgtctggttgggcaccggggtgattatcaacccaggcgtcaccatcggaaaaaactcggtcattggcgccggcagcgtggtgaaccgttccataccggcgaacgtgatcgccgctggggtcccctgccgggtattaagagcgatcgacgacagcgataaaaagaagtttcagctgtttacagggtaacttgtcatggcgccgggcgggcatcgcgaagtcagggcgcccgcttcatgctccgcgcgggaagatgccgggcaatttgccagcagggacgtgcttccgctgaatctcatgatgcttttgcctgactattcattgcccaggcatttctcgcgttacgctgaatgctaatttttcgtgaaacttagccccttccatcataatcatacaaacgtttgccatcgttattttctcgttttttttattcatttcctcagcctttttcagctgaggaggacaagcgttaatatgctttttcagcggctttttaattatccttttagccattattttttatgataatgtgattttttatagcgtttttatgtggtttttatgtgaataaatttatagttcatgagtagaaaaagtaatggtttttaccttgggtagggtattttatccatgcagaaaatgagagtttttatgctgatatatcagtaggatatgactagtgtaaaaaacgcaaaatgaaattaacctgttgagttataatgatattttaattttttttatttcctcgatttttgatgctagtattttaattaagtaatgtcgtaggctaaatatgagaataaataatgtttattatcgatgatgattttgatcgtggctccttacgttccttttcgtttggccgtaataccaagcccgcgttagcgattcagcgtattttgcaggcgctgctgcccgtgagcacaccgcttgagctgcagccggacgagcgatttgaatttttcgatgccgaaaataacgcgaatatattactcctgctcgagggaaccggcgtggtttgccatgatgaaaacaatatggcgataaccacgctattttccccctcggtactggggctgattgatggatatagtaccttttacgacgtagaggccaggccgaagcattttttttctgcagaaacacattgtacatgtcaattagtgccgcttgctaagtttgtggagattatagacgagcaaaatctctggcatgatatcgcccggattctggcccaccggttattggtcatggccatccgcgagaaggagtttattggcgtggaatcattcatcatgatccggacgttgattctggaactcggctcctatcctgaggaatatcgcgagcaaatcaacgtgctcaattttatccagcggcgcaccaatctttcccgcagcggaatactgtacgtcctgtctgaactgcgcaagggggagtacatcagcgtccatcgaggcgtgctgaagggaattaataaacgaattcctatcgatttttaaataagctcataacaatacaccaacaacggcgcctgttttttagacgcaccagctctttgaattattaacatcatgatttttatacgtaattatcattattgacttgcatcattttcgaatgtccagttttggacgaaaaaattgatttagattcataaaactttctgtaagaattattcccaggacaacacggagtgtcttcttatatttaaaccgtctttttatcgccacaggggaacgttccctggtaataacttcggctataaaaaaataagcggtaatgaatgagggaatacaaaatcaatttaatgtgtatggattaaaaaatgaaaaaagcatttatggtaaaaagcgtcgttctggcaatggttatggctggcggtatttcttctgcgatggcagcgaccagcgggtcttcttccaccgttcagggcggcaccgttgagtttaaaggctctgttgttgatgcggcctgtgcggtaaccgcagacactaccaaccaggttgtgaacatgggccaggtaaaactgtctgccttcaccggtaaagactccgtggctaaccagaaaactccgttcagcatcaagctggctgactgcgataccaccatcgcttcccaggcttctgtgaccttcgacggcaacgcggctgcaggtgaagctggcgtgctggacaacacctctggcgcgggcaacgcggcgggcgtgggcatccagatttatgacaaagacggctctgcgctggatctgggtaccgcgtctcaggctgttacgctgatcgacggcgacaataccctgaacttctccgctgactactaccagactgcggataccgcaacggccggtagcgtggacaccaccgccacgttcaacgtgacttaccagtaaggtcgcgttagtcattttcatttagggatcctgtgccagggacggcggctgtgtcattgaaaggagtagatatgaatttcactacacaacggctgaaggcgttttctctcgcgggggcgtttttgtttcccgctctggcacaggcgggcaaccaccacgtggtgacggtaaagggcggcgacgttgagtttcagggcgccgtggtcaatgccgcctgcgcggtggatgccggtagcgaggatttgaccgttgagatggggcaggtgcgctccaatgaatttcatgggctgggaagctggacagatccgcaggcgtttaccattacgctgaaggattgcgataccacggtaagccagcaagtcagcgtggcctttcgcggcctgacggatggcaaagatccgggggtactggcggtgaccgacggtgcgcagagcgcgcagggcgtcgggttaggcatttttgataatcagggaaatcaaattatcccgaacacgcagccgatgaattttaccgctattcaggacaatacgaccgtactcaattttgtcgccaaatatcgcgcgacctcgagaaccgtcgtggcaggggatgcaaacgcacaaacctggttcacgttaacctatttgtaatttcctgatgccgtccgcggcaaatctttattgtgaaaggcactttatgtccgttatttctttttctcgcctgtctctggttgcgctggccttagccggtgccggtctggctgtgcccgcggcgcaggcgcaaaccgaagcgcaggcgcacgccgcggcgaacggcggggtatcactaggttccacccgcgtcatctatccgcagggcaataatcaggtctcactggcggtgaataataccgacccgaaggccacctttttaattcagtcatgggtggaaaacgccagcgaaagcaaaagcagcgattttgtcatcaccccgccgctgtttgtgatgaagccgcagaaagaaaatacgctgcgcattatgtacgtcgggccgaataatctgcctacggatcgcgaaagcctctactgggttaacgtcaaagcgattccctcggcggcaaaagacaccaaagggaaaaataccctgcagatcgcggtgctgagccggattaaactttttgttcgcccgaaaaatctgccgatggcctcgattgatgcgccggcgaagctgcgcttccacgaaagcggtaataccctgacggtgaaaaacccaacgccctattatatgacgctggtacagattcacgccggtacagcaacgttaccgacgacaatggtggcgccgatgtcgcaggcggatttaaaactgccggcgaacgcgcagggaaatatcaccttccagaccattaatgattacggggcaaactcgcccgaacagaaagccataatagaataataaacaggtcggcaaaataatgacgttaaaaataaaatatatcacccttgcggtgatgcaggttctatttgcccgccgtcgggtataccgtattattttgccggcaaccttatcggcattaccgttatccgcgctggcggataactattttaaccccgcgtttttatcggatgaccctaacgcggtggccgatctctcgcatttcgaaaagggcgatagccaggccccgggtaaatatcacgttgatatttatctgaataagcagctggtctccacggaagacgtgaactttaaagcggcaaaaggcggccaggatgataccgggctggcgccgtgctttaccaccgggcgcctggaacagatgggggtcaataccaaagccttcccggacctggcgaagctggcgccggagcagtgtgcgccctttgccgctataccggaatcctccaccgagttcgactttgagcatcagcagctgaacatcagcgtgccgcaggcggcgctgaagcagagcgcgcgcggttatattcccccggaagagtgggaccaggggatcaacgcgctgctgctgaactatgacttcaccggcggcaacagcggcggcgatacgaaagaagacagctactatctcaacctgcaaagcggcctgaacctcggcgcctggcgcctgcgcgactactccacctggaactacaccagcggcgagggcgaaacggagaacaagtgggagcatatcagcacctacgtcgagcgcacgatcgcgccgctgaaggcggaacttacgctcggggaaagctacaccccgtcggatgttttcgacagcctcggctttcgcggcgtccagattgcctccgatgacaacatgctgccggacagcctgaaaggctttgcgccgacggtgcgcgggattgcgaagagcaacgccagggtcaccatcaagcagaacggctacgttatctaccagacctacgtctcgccgggcgccttcgccattaacgatctctacccgacctcgtcgagcggcgacctgcaggtgacggtaaaagagagcgacggtagcgaaaatacctttaccgtgccgtactccgcggtgccgctgctgcagcgcgaaggacgactgaaatacgccctgaccgccggtaaataccgcagcaccaacgatgatcaggatgaggtcaatttcgcccagggaacggcgatctatggtttgccgcatggtttcaccctttacggcggttcgcaggtcagcaacgactaccacgcctttgcgctgggcgccgggctgaatatgggtgatttcggcgcgatctccgccgatatcacccaggccaacagcaccctcgccgacggcagccagcacgacggtcagtcggtgcgcttcctctacgctaaggcgctgaacgatctcggcaccaacttccagctgctgggctaccgctactcgacggaggggttctacaccctcgacgagacgacgtataaaaatatgagcggctataccggcgacaatgagtggaaagatgaggatcacgacggtaagcaggataagccggtgtggaccgattactacgatctctactacaccaaaaaaggcaaagcgcagctcaatatctcgcagcaggtcggcaaaatcggctcgatttttgtcaccggctccgagcagacctactggcacaccgatgagaaagatcgcatgttgcaggtgggctataacggcagctggaacggcatctcctatagcctgacgtggaactatgacaagtcgccgggggaagaggaggcggatcagatctacgcctttaatatttcgctgccgattggccagtggctctccagcaaccatagcgcggatatctaccgttcggccaataccaccaatatgagcttcggcaccaccaccgaccagcacggtaagaccaccgggaccaccggcatcaacgggacgctgctggcggataacaacctgagctataacgtgcaggagagcgacggcaaccacggcaccagcaacagcggcaacgccaacatgagctatcagggcacctacggcaacctgcaggcgggctacaactacagcgacggctaccaccaggtgaactacggggtgagcggcggcgtggtggtccaccgcaacggcgtcacccttagccagccgctcggcgacaccaacattctggtgaaagcgccgggggcggccggcgtcgagctggaaaacgccaccggggtgaaaaccgactggcgcggctacgcggtgatcccgtacgccaccacctatcgccagaaccgcgtggcgctgaataccaactccatggggcagaacgtcgatattgaagacgcggtcaccaacgtggtgccgacccagggggcgctggtgcgcgccgaatttaacgcccacgtcggggtgcgcgcgctgatgaccctgatgcataacggcaagccggtgccgttcggcgccacggtcagccagaaggcgggtaacagcaccatcgtcggcgacgacggccaggcctatctcgccgggctgccactgaacggcatgctggaagtgcagtggggcgagagcgccggacagcactgcatggtgaaatatcaacttccggagagcgcgaagcagcagccggtgaataaagtcagcgaaaggtgccagtgatgaaaataaatgggcgtttgaacatgctaatagcattattgctattgagctggtcggccgtgacatgggcatatagttatgcttgtgaaccctcgggtggaacaaaagaatataatgcaagctttggcacttatactataacggatccaagtaaagatcaggcaggaacgatatttgaaaatgcagcctcctatagttcaggcggggtagcatcaatgacatgcgactgtccctctggttacatgtacgatcgttatttctggagcaaaacgtctttaacagttgacgaagaaattgatggtgagacgtactacgtagtcaatgaatatctggatgcgagtgtgtctatttatcttggcggagctgttaacaaatacgaaccgctgccatggactgctttggataataaagaaatggataggggaggatgtggtgggagtgttacatcagatgtcacaacgggtagcaaaggtacaatttcgctgaggattagcaaaccctttgttgggtcatttagtatacctaatctaaaagtcgcagatatttatgtggggcgctctgcaactggcgcttatggtgacacccctataacctcggtttatttatcgggtaacgttatcgtcccccaaacctgctccgttaacgccgggcaaattgtgaccgttgattttggctcctttatgtcgggtgagtttaaaaacaagggccagatgcccaccggctatacgccgaaaaccatcaccgtgccgattaaatgtaacgggatggatgctaacgccagcttaaccctgcgcttccaggcggaagcctcgacggatgaaccggcggcgattaagaccagcaacgacgatgtcggcgtgcagatcaccgatgacagcggcaaggtgattgagccgaacagcggcctgattcctttccaactggatgacaatatgcaggcgacggtgacctttcacgccgcgccgattagcaccaccggaaacgccccggcagagggaaccttttcggcgacagcctatattcgcgtcgactttgcatgaagcgcaaaaaacgctaaacggcatgttggtggtattgcggatcgaggtcaggcaataacgtcagatgcaatattaacgatctgtaagcatgaagcagtagccggtcagtatatccagtaaaaggtctagtaatgaaaaaatgtatcgctctatcaattgtactcatggccttgataaagttaatcagcgttcctgtatatgctaccgattatccttctggttcatgttatcttcctgatggatctacaaaaggaacgtatgattttaatatcaatacggtcgtatccgatcctacgcaaaacacatccggggagattttacccgccgtgaactcgaacagtagcggttcattctccgttgagtgctcttgccagggcgattcggttttttatacgcatcaatggacaacaacggatctggtttcgacgggaacctcaggaagtttgaatttttataaagcgaatgactatctttcagtggcgggtgagatcaaaaacccgggtgatggcacatattattctttgcccttggttgacttttataagcccgttgggggggggatgttatgtaatgatgtgacttcaggttttcattttggcaataacgttagagttacgttcagaatagatcgtaaatttgttgggacggtgagtttgccgcatataaaattatttgatttatggtacaccgtcggcagtgattttgtgcaaggctcgccagtggctaccgcttatattgatggccaaatatcggtcccccaaacctgctccgttaacgccgggcagatcgtgaccgttgattttggctcatttatgtcgggcgaatttaaaaacaagggccagatgcccactggctatacgccaaaaacaatttcggtaccgattaaatgtaatggcatagaggccaatgctaatttgacggttcgcttcctggcggaagcttcggcggatgaaccggcggcgattaagaccagcaacgacgatgtcggtgtgcagattaccgataacagcggcaaggtgattgagccgaacagcggtctgctcccgttccagctggatgacaatctgcaggcgacggtgacctttcacgccgcgccgattagcaccaccggaaacgccccggcagagggaaccttttcggcgacggcctatattcgcgttgactttgcctgaggaaaaaagatgaaaccggcaacactattcttccccctgttgatgaccttcgcgggcgtgcatagcgcaagcgccgatgatattgatagcggccaggtcgagctggatatgaccggcactatcgtcgcggaaagctgcgatatcgacaccgccagccagaaccagactatccatatcggcgatttcagcgccgggatatttcaaagcgtcggcgatacctcggagtggaagcagtttgatatcaaattaaataactgcacctcggcgatcagccagtcgacggtggcgttcagcggcacgtcggacggcagcgacccatcgctgttagccctctccgatacctccggcggcggcggaatggccagcggcgtggcgattgagctgctggacagcagtatgaacaccattgcgattaacagtaccgataacggatacccgattacccagggaaataacgatctgacgtttcgcctgcgctataaagctaccgcggtgccggttacgcccggcaacgcctcttcggtactctattttgatgtgagctatcaataatgaaaaagacgatcctgctgttatcgctatcctgcttgtcctgctcagcgctggcccacgacggcaccgtaaacattaccggcacgatccagggaaacacctgtaccgtgaccaccgataccgcgaaccagcaggtgaccctgggcgacattgcggcgaaacagtttaccgcggccggcagcgcctcccagccggtggcgttcaccatcgggctggaaaactgcggcagcgcggcgtcggcggtctcattaacctttaccggcgaggcggatacgaccaacagcgccctgctggcgttaaccagccaggcgggcagcgccgcgggcgtcggggtggcgatcttagacagccagcgtacgctggtgccgctgaacagcaccagccgccagtatacgctcgacccgcagcaaaccagccagaacctcaccttttacggtgagatggtagcgacgagcagcccggttaccgccggcagcgttgacgccacgaccacctttagcctgacctatcagtagcctgtccatgttgagaaaaatcgctgtactgctggcgctcagcgccttatcccttcaggcgcaggcgggcgtggtgatcggggggacccgctttatttataatgagggtaagccgtcgatatcgttccgggtgatcaatcaatcgccctcgcgctacttgattctgagcaaaattgttgccgatggcgacccgcaggcggcggtgccttttgtggcgacgccgccggtctttgcgctaaacggccataaagaaaatgaaattcgcgtgatgtacaccagcggccagctgccggcggaccgcgaaagtctgttttgggtcacggtggccaatatccctcaggccgacagtcagcagcagaataccctgcagattgcggtgcgcagccgcatgaagctgttctatcgcccgaaaggcgtacaaggggattcacagcaggcttatcgccagctgacctggcggcgcgagggtaaaacggtaacggtgcagaacccgacgccgttttacgtcacgctgctgaatatgcaggccaacggccagagtatcgccggggccgggatggtcgcgccgctttccagccgctcggtggcgtggtgtccggcgcagggcggctgcgcgctgcagtggcagacccttaacgactatggtagggccatgccggccatgcatatttcgcccgatgtgcaggccaggaaggggcaataagatgcaaacaaaactcggggaggcgccggtaacggcggcctcccgctggctccttatgatgctggcgctgatcctgcttggcgttatgcatattgtcctgcccagcaccggcggcagcggcgctgatttaccggaaccgctgctggtctggtgcgtgctgctggtcgcgatggtcggctgcgcctggtttttgcggcatcagaggctacgcagcagcccgttcctgcgcggcatggcgctggcggcgttactgctgacgctgcccctgctctggagcccctccgccgactggcggctggacgccttcccgcgcctggcgggcctgtgggcgggcgtggcgttttattatctgctgctgaactgtcggctcacgccgcgtcagcagcagaccgtactatggctgatcgtcgccgccaccctgattcaggcggtctatgcgctggtgggtatcggtcatccggcgtggctgccgctgccggcgcaggcggcgcagcgccaggccggtcagttcgcgatcggcgtttttctgcaacgcaacgtcaccggctcctttattgccaccggcgccgcggtgctgctgtggctggcggccgatgcccgctttgtctgccgcagcgtcgcgagggagagatatcgtcagtggggaagcgcgctcgggctcgggctgctctacgccacgctgaccctgctgaaatcccgcaccggatggctgggcggcgtggtctgctggctgatgatggtgaccattttttgcttctcgccgttacgccgctccgccgcgcgcggggcacgctggcgtgtcgtactggcgccggtggccggtgtgctgctggggcttgccctgctatcggtctcgttactcaacgccctgcatgaacatgacggctcgaatcttgagcgggtttttattctgcagcagacctggaaaatgatactgcagcatccgatcgtcggctggggctacgggggatacgcctggtcctttgcccatttcgtggccgatagcgtcccgccgttgtcccgccgggtcccggggttaacctatccgcataatgacctgctgttctggtgggtcgagggcggagcggtcgccctgctcgggctgctggtgctgggggttagcggattcaggctactgctgcgccgccccggcgtacggcagctggcgctgctggcctgcctgatgcccattttgctgcacacgcagctggagtatccgctgtatcaatcgccggtacactggttgctcgttcttatcctggtcaacctggccgatcgctgtccgaccggcgaacaggcgccgctgtccgcattcaccgcgccctccacgcggccggtgccctgcgcgctgatgatcctggcctgctacggcgcgctgctcaccggctgcgccttctggcagggacactatctgaccgcttttcagcagtcgccgcagcgttttgccagccgcgtactgcggctgcatgacatcggcatcggcagcgaaaggctgcgtaaagatcgggcgctcagctatatcatccgctatcagtcgagcgctaacgtggaggatctggaggctttcaaccagctcggcaggcgctggattgcggtgtggaacgacgccgatatgtacaacaatcttattaacgtcgagcggtatcttgggcaacagcaaaacgcccgggctttgcgcgaggaggcccggcggctctatcctgaggaccggcgtttttcatcgtagccacgatgcctgttatgatcccgggctcagcgtcgcagaggcagctgagcctttttacgtatattgccggtcggggctgaaaaaatattgattgaatataattagcagtgtaattatctcctgtggtttgaaattgatttcaaaaatgcccaacacaggagtgttaccccatggacgcacgtcaatgcactgccgcagcggctttacttctcgcctgcacttcttctttttgctacgccggccataccggaaaagtccgcttcattggcacggttgtggagtcgggatgctggaacacgcccggccaaaatgaattattctgttatcgcgataagaccatttctcattattccgcggcgcacgtcagcagcgtttcgctggatgtcagtaatgcggtggtgcaaaaaacatttcttgataaacaaaagcagcttgaacagttaacgattaattactattaagtttaatgacatttaaatatcttcagctcattgggttgaagatatttatctcgtcagaaaattaagatgttagcaagaaattacataattttattattcttacaatctacgaccactttatcgctgcgaatttattgaatcaccacatattcctctatactattcctcatatgttttacgcagaaaagaaataatatatggctaaggtggttttatttccgcagatcgcttcttcgctggagtggttaaaagggcatggcgatacaattcttcagtatggctggaacgtgattgccgcttgtattctcttttttatcggccgggttgtctcaaccttattatctaaaggtatcgagaaaatacttctgcggcgcagggtagatattaccgttatccatttctttgccgccctggtacgctatatcacgctggcgtttgcggccatcgccgcgcttggccgcttaggcatagaaacgtcctcaattattgcggttatcggcgcggcggggctggcggtggggcttgcgctgcagggatcgctatcaaactttgccgctggcgtactgctagtcacgctacgtcctttccgggccggaaacctggtgcagatcggcgccattaccggagtggtggaatccgtacatatattttctaccaccttgctcaccgcggataataaagacgtggtgatcccgaacggcaaaattatcgccgacagcatcgttaactattcgcgccatccatttcggcgtatcgatttgatgattagcgtcggctacgatagccggattgcggaagtgaagcgcgttattctggcggtcatcgatgctgacagacgcatcgatcggcagcgtgacaccaccgttcgtctggccgaacttggcgcctcgtcacttaattttaccgtgcgcgtgtgggtgaaaaacacccattactgggatacctattacgatctgctggagaatattaaagaggcgctggacgaacatcatattacgattccttatccgcagatggatattcgcgtggccggcaccgtaccaacgttatcctgatggctgagatgatatgaatccgaaagtgatgggttgtatggctgtctgttttctgctgacgggctgcggcagcgtcatgggaagaaccactctggcggagggcgaaacgtggtatccaggggttaaaacggatatcgcggtgatccgcggtgacagcgagtatgattataattatcttcagggcacattatggaccctggatacgccgctgtcgtttattggtgatacgctgatgctgccggttgattatttccacggcccttggttaattcactctgcaaaataaaatatattataagatggtgtttattcattatgagttctattttacatgtggccgtaatgtctccaaatcgttatttctgcctggggctgaatagcctgcatgaacaaaaggcgatgcccgctattcagctgcacttttgtcacgacctgaagtccttaaaagcattaatggagagcgttacgctctccggcgtgctaatggaaacgtttggtgaaggagagaacatctacgatgcgtttgtttttggcgattatctaaaaaggcaggccagagacatcgccgtgtttgtttttcgctcattctggagcaatctttctgatttgccgcattatgcgcgctatcatgtttcctcaactgaagatgaaatatgggaatatttgaaattaatactgaggggctatcagcgaaataattatatctcccgctgggagaccctgctgacccataaagagtatcaagtgatcagaatgctgtgctgcggaaagcagtatcatcacatagggaaatcactgggtattacgattaaaaccgtgagcacgcataaaatcaaagcgctgaaaaaactcggcgcgcccagcatgtcatctttaattctacaatttaaacgctaatggtcgcgtacggcgtagcaggctgccgtggccgggcgtgcatagaccatccgcggatccccgcatgctgcgtatttatcgcgccagccaacgccatcccgcagcaatagcataatctcttattctcccttcctgtattctgctttcctgttgatggtgctcgtaatatattctcgcctggttttaataaaaacccataatagggctatgaaattgcgaaggctaaacgtgattccatgtaacaaagcaacatgtgaactggcttacattttcaaccgcgctcgccatttatagtgagcgccagtgttagggggcgtattcaatcatcatggcatccattaaagacgtagcgaaaagagcgggggtctcgacggcgaccgtatcgcgagtgctcaacaatcatcccagcgtcgtgccggaaacgcggcaggcggtgcgtgatgcgatggattacctctgctatgtccccagcaagagttcgtttcagcttagcgggaaatgttcagggctgattggtgtggttttgcctaatctggtgaatcctcacttctgcgaactgttggcgacggtagaagaagaggcccggtatatcggcaaatcggtgatcgttaaaacgcatcagaaccagccgcagcaggataaacatattattcagaccttagtagggatgggcattgacagcttgctatgggtgccgacagaagctgaagccgaactttcagaatggttaagcattacccggatcccggtcgccgttgtcacccaggtgtcccggttctttaattccgtatcgattaaccaggatcggggggcggaaagtattgcggaacattttattcatacgggccatctttcatttggctttgttgcccaggaaggggtggatagccgcaaggtctcgtcgtacagcaaaaaaatagcgagtcacggtttaaagcttgcgaaagataattcgttctggatagccaaaggcgagggtgaaaagatatcaggccatattagtattcttgatgacattatcgagaaactcagcgagccgacgcgaacctgtacatgtctgttagtgtataacgatattgcggcaaactatattatcgatgggctaaaagaaaagagcatctccgttcctgaagatattgcgattgccagctttgataataccctgctggcgcaaactaaaaaaatcaccagcgttgcacagccggtaaatgaaattgctcacctcgcgtttcagatggtgaaacatcaacagcagccggacagtattgaaatgcacgaaattgtctcgcggttaattatccgtgagagcagcgtaaaaattaatattacttccctgtaagggatttatgtttagaaatggcgcgacaatttgcgccatgggctccttttaacaaaaaataggtatatttatgtctgctaccgcaatggaaaagccaagcgcttatgaaaagctggggctgagggagaagatcggctacggcatgggtgacgctggttcaggaatgatatggagcgtactggcgctctatctgacgtggttttataccgatgtatatggcctgaacgccggggtggtgggcacattattcctggttatccgcatctttgacgcttttagcgatccgctgatgggggccatctgcgaccgcaccgtctcgcgctggggtaaattccgcccatggttattatggatggcgtttccgtttggtctgggcgcggtactgatgttcacgaccccagagctcagcatgaacggcaagattatctatgcctgggttacctatctggtcatgtcgctgatttataccgcgattaatattccctattgctcggtcggcggcgtcattacgctcaatcagaaagagcgcatgggctgcctgtcgtggcgctttttccttaatggcctggcaacattaattatctcctcctctattctgccgttaacggactggctgggtaacggcgatcgtgcgtccggtttccagctaaccatgatcattatgggcggtgcggcaacgctgatgttcctgttctgcttttccagcattaaagagcgggtggtatcggttaagcaaaacgagtcgttgaagaaagacctgcgggatattatcaaaaacgatcagtggctcttgatgatcactattaccttcctgaacgttttcccggcatttatccgcggcggcgtcactatctattatgctacttacgtcatgaaagagtcggtcggatttattaccttctttatggcgctgggcgtggcctgtaatatgctgggcagcgtgcttgccaaaccgctgaccgatcgctttgataagctggcgctgttccgcattattaatattattctcggcattctctcatttgcgctgtggtttgttgatccgcaatccctgaccccgctgatgacgctattcatcattattaacgttctgcatttaattcagtctggtcccattttgtgggcgatgatgtccgatgtcgatgactacggtgactggaaatttggtaaacgcctgaccggcatctccttcgcgggaaacctgtttatgctcaaaatggggctggcggtcgccggcgctatcgtcgcctggattctggcgtttaccggctatgtcgcgaatgagccgcagcaaaattcgcagaccattcaaggcattatcatgatgttctcactgctgccgatggtgagttatttcatcagcgcgtatctggtgcgctacttcaagctgaataacgcgttccttgagaaaatcaaaacggatcttgcaaaacgtgagctggaaaaaggtcgcggtcaaccacaggaggttcaggatgtccctgtcatttaatattaaacaaggtcagcgcattgatttgtggctgaaagcgtccgaaccggcggcgcaacccctgttttctattcgcgtgaacggtcaggttgtatttaagattcaggaggcgccgcgctacttccagtattttacctggacctcgtttcaggacggcgttgccaccctggagtggctgccggaatatagcgagatatcgctttgttacacctggcatccggattcactgcgcgcgcgcggcgtcacctttatcgcgacagccgggcaggatttgcgcctgatgagcggtcaggatattgctgacgagtatctgcgggagccgctgcgcccggcattgcatttctcgccgcgtaccggctggatgaacgaccctaacgggctgcactacaagaacggcgagtggcatctgttttaccagtatcatccgcactccagccaatggggccccatgcactggaatcatgctgtgagccgcgatctgtatcactggcggcattatccggttttcctccagccggagcagaatctttccgcgctgggcgcgacgggcggcgcgttttccggcagcgcgtatattgataaacaaggaaaaacccgcttctggtataccgaacggctcccggcttacgatctgtatcgcggctaccgggaagtgcagaaaatggccgttgcgcacgacgactacgataagccggaatgggtgaaaaccgtcttaaccgacctgcctgcgggcgtggactgcgatttccgcgatccaaaagtgtggtacgaagaggccgatgccaccttttatatgatcctcggcgcctcggtaaacggcgatccggcgatgctgctctttcactctgcggatagtgaacgctggacgttccatcatgtgctgtatgtcgctcccggctattttcgcgaaaacggcggtcgctgcgtcgaatgcccggatttcttctgcctggatggcgtatgggtattaattatcggcgtcgttggctacaaggagccgacaaccgggcggcataatttgctttttgcccagaccggtactttccggaacggttatttcacgccgtccgagcagccgctacagactttagatttcggtacggatttctacgccctgcaaacctggggcgaggacgaccgaagaatcggctttgcctggttatataactgggcgacgcagaaaccggtggattccgcttactcgggggaaatgtcgctcccgcgtcgctttcatctcaatgcgcagcagcggctatgcatgatgccggagctgccgccggaatcattggtcgtcagccgccatgcgctggatgacggtgatatctgggttaatgagaaaggctgtaaagccggcattgtaacctttatgcctgccggtggtttccgtttgacgttaacgggcgatagcggccagcaaatcatcctcgaacaggagggtaaaaatctgacgctatatgaaaaaggccgggacgatgggcgttaccgcgcgccggtagccagcgtcagcgacgtcacgctgtgttttgatgccgggattgttgaggtcttcgcaaatcagggcagcgtatgcggtacgcgacgctattactcatgcagtcagctcacccggatccagctctccggcgcgccggcacagcttacgcaatatcgctcgacgtattcgcaggaataagcaaagtcaaatttaagcgttgatgttcgatttcttattatcattagaggcggtttttcatggtacgtaaaaattattatgatgttacgcagtggcacgttggcaatccgtatgaggatattggcgaagtcattaacagtattctcgccgatattaaatcgcgacaaacggaaatcgatattaacgacgggggtaaaccgggcgccgcgatttatattccgcccggcgattatcatctgaagacgcaggtcttaattgatatcagttatttaaaaattatgggttccgggcatggttttgtctcctcgagcattcgctttaatacgccggcggacgagtgggcgaatttgcacgatatatggccgggcgggagccgtattctggtcgatctctgcccgcagcccggcgatgaagaacacgctggcgctgcattttacgtgaaacgcagcggggcgccgcgtatcagttcggtggcgttcgaaaacttctgtattgatggtttgcactttgttgatgatgggctgggaaacaacgacccggaaaatagctatacgaacggcaaaaccgggatttatatcgccagcgcgcaggatgctttccgcattaccgggatgggatttatctatctggagcatggcctcaccgcgtacaatagcgatgcaatggcgatccataataactttatcgccgaatgcggtaactgtatcgagctgcgtggcgccgggcaggcttcaaaaataaccgataacctgattggcgcgggctataaaggctattctatttatgccgaaaattttggtgggctattaatttctaccaacaatatcttcccgcgcggcgcaagcagcgttcacttatcgggcgtggtccgctctagcatcaccagcaatcgattccattcattttatccgggaatgctcgttctcgagaacaactgtgcggagaatctgatctcggcaaaccatttcttgcgcgatcgtgaaccctggccgccgatgcaggcctatgacaacggcctggatgatgcctatggcttgctgcatataaacggcagtaataattcggttattgccaatcatatttccgaaacgattgatgtccagtatctcaagccgcagggaataaaaccggtcatcatccgccttgtttccggcaaagggaattatattgcgaataaccatatcgtggcgaccacggagacgtcagcggcgcaggcgcagccctccgaagaggatgcctgctttgcggcgcaggtcagcgctttgctgacgacggccaggttaaaagaactcgatgcggtcgccgtgcaggtagaaaaagaatccgcgcaaaacacgatacttgatagcggcagtgacgcacaggtggtcatagaccgagcgcgtaatgccttcagggcgacaccggttgctggaaattaatattcactctgtttgttaatctgtatagcgaatgacgttatttaaggaggcagattacacgttatttcattcattcttctgctaaataaaaatcaaaatataaaaggtgaatatttttattcaccttatcccaccttttacctctgggaaaataaaaatgaataaaacaacattatcaatagcgctaggcttgtgtttaataacgggatcggcggtcgggaaaaataatcaactgacgctggaacaacgaatggaacagcttgaagcgcggcttgccgccgcggaaagccgggcgacggtagcggaaggccaggtgcgggatttacaggcgaagcagaatgccgcgattcaggcggcgcaaacccgtgtgccggtaaacagcgcggcggcaaccgcggagagtaaaaagaatcttagcgtcccggagctgaaattatccggctatggcgatctgaaaatctacggcgacgtggagttcaacatggacgcggaaagcaaacacggcctgctggcgatgaccaacgccgatgtcggcagcgatcccacctacgataagtgggatttaaacggccgtatcctgctcggcttcgacggtatccgcaaaacggataacggctattttgccggtttctctgtccagccgctggcggatatgaccggctcgatgaacctcgacgacgcggtattcttctttggtcaggagaacgactggaaggtgaaagtggggcgctttgaagcgtacgacatgttcccgctgaatcaggacaccttcgtcgagcactccggtaataccgccaacgacctctacagcgacggccatggctatatctatatgatgaaagagggtcgcggccgctctgacgcaggcggcaacttcctgctgagcaagcagcttgataactggtattttgagctcaacaccctgctggaagacggtacgtcgctgtacgacaacgatggctaccatggtcgcgatatggagcagaaaaagaacgtcgcctatttgcgtccggtggtgtcatgggcgaaagacgaattttccgttgccgcggccatggaagcgaacgtggtgcagaacgcctacggctataaagatgcccagggcaactttatcgatcagtcggggcgcaccggctatggcctgaccatgacctggaacggcctgaagcgcgacccggaggacggggtggtgatgaatctgaataccgcttatatggacgccagcaacgaacaggattttaccgccggggtgaacgcgctgtggcggcgcttcgagctgggatatatctacgcgcataacaaaatcagcgattatgccggggtgatttgcgagaacgactgctggattaaggatgaaggcacctacaatattcataccttccacgcgtcgtatcaaattccgaacgtgatgaatatgcagaactttaatatctatctcggcgcctattactccattctcgacagcgacgagaagctgagcctgggggatgatgacgatcgctacggcgcgcgggtgcgctttaagtacttcttctaagcgcttgaaacggctgccccgctcagcacaacggggcagccatagttttactccagataaaacacctctttaagctccgcgcttaccggactgttgtccggattggcaggcatcacatcgcgcatatgctgccaccagcgctggcacacctcggtcccggcgacggcgtcccagcgcgcttcggattcaatctccaccgtggcgaacagcagatggcgctctttatcgagataaatcgcgtagtggtgcgcgccgtgggctttcagcaccgcttccagttccggccagatggggttatgacggcgctgatactcttcatgcgcgtccgggtttacctgcatcacgaaagctttgcggatcataatgcctccagatagagttcgcggacttcatcgcggctggcggtgcgcggattgcacggtgcgcacgggtcggccagcgctttatccagccagccttcaatatcggctttgctgacgccaagctggctgaagccttgcggaatgccgacgcgtttgcttagcgcgcggatggcgttgatggcctccatgctggccgcttcatcgctcataccgcgagtatcgacgcccatcgcctgcgccacgcgcgcgaagcgggcaaccgcgttcgggcgattaaagttttcgatgatcggcagcaggatggcgttgcacacgccgtgcggcaggttgtgggtagcgcccggctgatgagccagcgcatgcaccaggccaagaccggcgctgttaaacgccatgcccgccagatactggccaaacgccatctgctcgcgggcttcaagattgtgtccgtcgtccacggcttgcggcagccattggttgatcaggcgaatcgcttccagggcattggcatcggtcagcgggtgcgcgccaacggaaacaaaggcttcaatggcgtgggtcagcgcgtccatgccggtggcggcggtaatggacggcgggatatccagcatcacgctggcgtcatcgacggcgatatcgggaatgatattggggtcgataatcacctcttttacctggcgctcggcgtcgataataaccgcgttgctggtcatctccgccgcggtgccggcggtcgtgttgatggccaccagcggcacgccggcgtttttcactttgccgacgccggaataggcggtcgatggccccgggttggcggtgaggatttttatcgctttggcggtatcaatcgggctgccgccgccgaaggcgataaggtaatcacatccggcctcccgatactccgcgtagcctttttgcaccagcgcttccgttgggttagggaacacctcgtcaaacagatggtaagacatctgctgttcatccagggcggtaaacaggctgtcgagcagccccagcttcaccagctggccgtcggtgacgatcagcgctttgccccagcgtttacccgccaccagcttgaccatatcgccgattgcgcccgcgccatggaggctgattttgggcagtgccaacataaaactcatgataattctccttaatgttgatttgggtaatccgtttcccttcacccgcccccgggtcgcggctggcgccttacccgggctacacgtaccggtcagattagggggaaggggaaattaaattcgtcttcgctgcatcatccgccgggtaataatcggcagcgagatcaccacgatcagcatcgcgccgatgatgatcgacatcacgatccccggcacgttgagcaggctcaggccaaacgtcaccagccccatcaggaaggcggcgataatcacccccaccatgctgccggagccgccgagaatattgacgccgccgagcaccgccatcgtgacgaccgccagctcccagcccatcgccagcgtcgggcgggtgctgccgagcctcgaggtcagcaggaccgccgccagcccggccatcagcccgaccagcgcgaacagcaccagattgtggcgcttgacgttgatcccggagaaccaggctccggtcgggttattgccgatggcgtaggtccggcggccaaagttggttttatgcagcaggaaggtaaaggcggcggcgaggaggataaacagcgcgaactcaaaagagagcgctccccacacgtagccctggccgaaccaggcgaagctgtccgggtagtgattgagcgccttgtcgcccagcagaatgtaggttattccgcgatacaggctcatggtgccgatggtgatcacaatcgacgacaggttaaagcgcgtcaccaggataccgttgaacaggccgcacagcagccccacgcccagcccgacggccaccagcagcggcgtatccatacccgccgccgcgcagaagcccatcgccgttgagctcagcgccatcgtcgaggctaccgaaaggtcgatctctctggcgataatcagcatcgccatcggcagcacgatgatcgctttttccgtaaagttaaacgtggcgtccgacaggttccagatattaaggaaccagggtgacgccagggcgttaaccacgaataccgccagggttaccgccagcagaaacccttcccagcacagcaagcggcgcagcggcgacggcgcggccggggcgcttttcatctcttcagacatcattattttgctcatgatttcaccgcctgtttctgccgcgccagcgccgcgttgcgcaggattaaccgcccgccacctttattaccgcgttcgttaagcagcaccgcaatgacgatcaccgcgccggaaatggccatttgccagaacggcgaaatgccaatcaccggcagcgcgttattgataacgccgaggaacagcgcgccgcacaggcagccgagcacgcgaccggttccgcccatggtgctgatgccgccgatgacgcaggcggcgaccacctgcagttcaaaaccgttggcgacatcgacataggcgacggcgaagcgcgagatccacagatagccgcagaacccggccagcgcgccggagaggcagaagctgacaaactgcattttcccggcgttaatcccggtgtagtacgccgccgtcgcgttgccgcccgcggtgtacaaggcccggccggtgcggctgtagcggaggaaatagcccaccagcagcagcgcggcgatggcgcaccagctcagcagcggcagccccagcagcgaggcgcgcggcaggccgagaaaatcggcgctcatctggtgtgagttgacccagccgccgttggaaagcagaaagataatcccgcgataaatactcatggtgcccagcgtgaccacgatggccggaatgccgagccgccagaccagcaggccgttaatcatccccatcagcaggccaagcagggtcgccagcgccagcagcgccgccaccgggatacccggatagtgggcgttgagcagcgcgacgatcatcccggtcagcgccagattggcggccatcgacagatcgatgcctttggtgagcagcaccatcatctggccgagggcgaggacgatcagaatggcggtgtcgttaaacatctccaccagattgcccggcgagacgaacgacggcgcccggctgccgatagcgccgatcagcaaaacgatcaccgccgccagcagcgcttcgcggtgtttaagcagttgtttacccattacgctgcctcccgaccggcgccgctggcggcgctgacgatggtttccgccgtcgcttcaccggcgcgatactcggccaccatcagcccttcgtgcatcacgataatccggtcggccatgcccatcacttccggcagctccgaagagaccataatgaccgccagcccctggctgaccagctcggacataaactggtgcaccgccgctttggagccgatatcgatgcctttagtcggttcgtcgaggataatcacctcgggatgggtcgccagccatttgccgatcaccactttttgctgattgccgccggaaagggtttccaccgcctgccgccagctaaaggccttaacctgcaggcgcgaggcgtactcgtccgccagccgccattcgcgggcgtcgttaagcacgccgccggggttcagtttgctgagctgcggcaggctgatgttctgggcgatcggcagggcgataattgctccctgcttctgccgctcttccggcacgcagacgataccggcgccgatcgcgtcggccggctggcgaaagcgcatcggtttccccttcagcacgatatcgccggaagagggatgcgagactccggagagcgcctgcatcagctcggtgcgcccggcgcccaccagcccgtaaaagccaagaatctcccctttgcgcaggctgaagctgatatgggcgaactcggtggggtggcagaggtctttcacctccagcaccgtttcccctgggatacaatcgactttcgggtaggtttgggtaatcgcgcggcccaccatcatcgccaccatccgctcttcggtgatgtcgttgatcgcaccggagctgacgtacacgccgtcgcgcagaatggtgtagtagtccgccagctcgaaaatctcatcgaacttatgcgagataaacaggatcgctttgccgtcctgcttcaggcgctcaacgatctgatagaactccagaatttcatgctgcgagagcgcggcggtcggctcatcgaggattaccacctgagcttcaaaggagagcgcccgggcgatggcgaccatatggcgctgggcgatactgagggttttcagcgtcgcgcgcgggtcaatctgtacctcgaggcgggtgagaatttcgctggctttgcggtgcatggcgggccagtcgagcttcttcagcaggccgcgatgcagatactggccgacgaagatattttcggtgaccgagagttcgtcgaacagcacggtttcctgatgaatcgcggtgatcccgaccttatgcgccgactccggattcggtagttggatagggatcgctttatagagaatctcgccctcttcgggctgataaataccggtcatcactttgaccagcgtcgatttccccgcgccgttttcgccgattaaagcggtcactttgccgggccagagatcgagctgtacgttttcaagagcgcgcacaccgggaaaaatcttggtgatgccctttagcgacagcagtggggtggatgctgacatgatagttctccgtaaaatcacccctcaccctaaccctctccccaaaggggcgaaggaaccgttcagtgctcgctggcagcagtgcgcagagggcctgactttctccctctctttttggaagagggccggagtgaggaaacagggttagaaaattttcgagaacttatcgatgttgctcgcatcgtagacgaacggttcggccatcgcgccgctaccgtcggcgtccagcttcactttgcccagcttgcccatattggcttcggttttggtcgccgtgcctttgactaaatcgtcggccagatacgtggcggcgtagccaaggtcaatcgggttccagatggcgaagcttttgctggcgccggacttaatcgcccccgccatttccgacggcagccccagcccggtgacgtagaccttgccgattttgccctgatctttcaccgcctgcgcggcggccacgatccccaccgacgaaggcgaaacaatcactttcaggtcagggtatgacttcagcaggcccaccgcttcgcgatagcttttatccgacagatcgtcaccgtaggcgacggtcaccagattgacggacggatactgcggcagcacctttttcatctcctcaatccagatgttctggttggtggaggttggggtggcgcttaaaatcgccacatcgcctttttccacgttcagcgccttcagcgcatcggcggcgagcttaacgttggtttcgccaatcagcgcgttattggacgggttaagatggatctggcggcccgccggcgcgacgccggagtcccaggagaccaccttaatgccgcgctgcatcgcttttttcagtaccggcaccacggcgtcgggatcgttagcggaaatggcgatcgcatccaccccctgggcgatcaaaccattcagcacttcgatctgcgcttcggcggtggtggtggtcgggccggtatagatcactttgacatcgcctaactctttggccgcttcctgcgcgccgacgttcgctgcttcgaagaatccatttcccaatgatttcgccacgagggcgattttgacttcggctaaagcggaaccggacaacgccaggatggcaacggtgaggatcaagcttgtgtttgttttcattgcttttactccacatgagttagtttgtagggtttgcaggtgattttttcgccccgtctcggtgagcggggcgcgatgttgttatggataaaggtctaacgcggactgcaggggttgaacgttgaagcgtttgccaagggcgaccagctcttcgcgggtgatggtttgtttcatcccgcccattgagtaaactttcaccagcacctcggcggatttctcagcggtatcgatcaggccgaaagtttcgtccagattagggccgctgccgaaaacgccgtggaacggccacagcaccagcgaatgtttctgcatcgcctcggcggtggcctggccgatttcgtcggtgcccggcaccatccacggcaggatcccgacgccgtccgggaagaccaccaggcattcggtactcccttcccacagcttgcgggtaaacagatcgctgctgttctccagcacgtaggtcagggcgatcagattggtggcgtggcagtgcatgatcacccggtctttaccgttggtcagccggatgcgctcgctgtgcgacaggaagtgcgccggcagctcggatgttggcaccgcatcgttggtcaggccccaaagaatatggtatcccgcgccgtcgctgtcgactttcaccaccccgaggttcgccgccgggtcgagctggacgttacggaagaatttaccggaaccggtgacgataaacggctggttagccagcgtcggcatcggctggctcagggcgatatagcgcggtttagcgtggaaatccgccgcgtagggttcgatatccgcttcgtcgaggcgcagcgtcaggttgccgccgttgcgctcgtcccagcctttcagccaggcgtcagaagtggctttaatcatgccctggacgaaccaggcgtcgataatggtctgcatagtcttgtctttcctgttgattcggcgcggggttggcccctcgccctgaatatgtgcgagcccccggattgcgccgtaaacggcttatccgggctaccggtttgtagcccggccgcgacccggggaacgtccgggctttacccgcgctggctcagaaccgcattctcataagcgcgtacgttatccagccactggctgcctgccggcgtatcgtgacgctgacagtacatctcccagatggcctgccacggcaggcacttctgctcttccagcagcgccaggcgggcggtgtagtcgccgtcgacttccagctgacgcagctgcccggtcggttccagcagggcgcgcagcagcgctttcttcatattgcgcgtgccaatcacccacgccgcgatgcggttaatcgaagcgtcgaagaaatcgagaccgatatgcacgcggtcgaacagatcgtgacggatgatttcgctggcgatggcctgggtttcgtcatccagcagcaccacgtggtcgctgtcccagcgtaccggacggctgacgtgcagcagcagacgcgggatatagagcatggcggcggagattttgtcggagatgacctccgtcgggtggaagtggccggcatccaggcacagggcggtctggcggctggtggcgtagcccatatagaactcattggagccgacggtgtagctttccgcgccgataccgaacagtttgctctcgacggcatcaatgtggtgcgccgggtccagcttttcgctgatcacttcatcgagcgcgttcagcaggcgctggcgcggcgcgaagcggtcaacggtaatatccttcatgccgtccgggatccagatattcattaccgacggcgtgcccagctgctcgccgaagtaagcggaaatacggcggctggccttgcagtgatcgatccagaactggcggatttcatcgttggcgtgcgacagcgtaaagccgtcagcgcttagcggatgcgagaagcaggaggggttaaaatcgagccccagcttgttggctttcgcccactcaacccagtttttaaagtgctccggcttaatttcattgcgcggcaccggcgcgtcggattcgagatagagcgcgtgcaggttcaggcgttttggcccggggatcaggctcagcgcctgctcaaggtcggcgcgcagctcgctggcgttacgcgctttacccgggtagttgccggtggcctgaataccgccggtcaggcttccttccgggttttcgaaaccgacgacgtcatcgccctgccagcaatgcatggaaacgggcaggcgatccagctggcgcaaggcctcctcgacgtccacgccgacgctggcgtagcgctgtttggcaatttcccaggcttgttcaagttgagtggtcatgcgcaaagctccttggtctgttgtggctgaaactgcgcgacgaagcgggcaatttcactttcaggattgggggtaaaggtggtgagggcgtagttttgccgcaccacctgacggaattcatcgacgttgtgcagctcgtccagggtcatcagctgaatgccgatattgcccagggtggaggcctcaatcgggccggcgaccacggtgatgccgcaggcgtcggcgcacagctggttgagcagttcgttctggcagccgccgccgacaatatgcagctggctgaacggctgaccgcgcagcgccgccagctcgttgagcacccgggcatagagcagcgccaggctgtcaaaaatacagcgcgccagctcggcgtcggtatcgggaaccggctgcccggcttcgcggcaggcggcctggatttccgcgctcatgttgtccgggttgataaagcggtcatcgttgcagtcgatgacgaagcggcaggccggaagcgcagcggtacgcgcgatcagcgctggcaggtcgccgacgttttgctccttgagcacccgctgcagcagccacaggcccataatatttttcagcacccgatagcggccttcggcaccgccttcgttggtgatattggcccttagcgccgcatcgctggtgcagggggttttgctttcaaagcccatcagcgaccaggtgccggaagagagatacgcggcgtttttgctggccagcggcgaggcgataaccgcgctggcggtatcgtggctggcgacggcgaccaccgggatgttattgccctgcgggcaaatccagtggccaataacgttgccgggatgggtcggcgttccgaaccattcgcgcggcgcgccgctccagttcagcagatcttcgtcccagctatcgctgttgatgttgaccagctgcgtggtagtggcgttggtgtattcccagttcatgttaccggtcaggcggaagctaaagtagtccgggatcagcagcgcgtgcgcggcctggctgaccagctccggctgctgttcaaccagcgcgcgcagctgataaagggtattaaacggcagaaactgaataccgctgcggcgatagatctccgcccggcccagctgctcttcggcatggcgcatcaggccctgggtgcgggagtcgcgataggaaaccggcaggccgacgcgctgacccgctttatccagcaggacataatccacgccccaggtatcgatgccgatgctgtcgatcaggatgccctgttcgcagaccttctccagaccgcggcgaatttccccttccaggctatcgagatcccagcagtcgaagccatccaccttttgcaggctattggtaaaacggtgaatttcacgcagcgccagcgtttgctggccgggctgataaccggcgagcatcacccgcccgctggaggcgcctaaatcgacggcgacacaatgacgaaaactcatgggaagatccttgtgaaaatcattgcatacagtctaaaaaagtcgcgtcgggctcaccttcttgttactgacagggaaaattggcctctggcaagaaagcaaaggtgaccgtgagggaggtcacagtttcgttttctccgcgctggggtgagggatgtgatgttgtccgcagttcccgatctttcccgtcatttcttgaaaaagcggcaggctttacgaattttgcggtcaaaaattgaaggccggatcgccgacccttaattactatttgctccactgattgataacttttctcatctcgaggagcggctatgactatgttgcacagtgtggatttctttaagtccggcgtttcagctgtcgccattgagccgcggctcccgcaatccgcttttcctgagcatcaccatgattttcatgagattgttattgtggagcacggcaccgggattcacgttttcaacggccagccctacaccatcagcggcggctcggtctgctttattcgcgatcacgatcgccatctctacgagcacacggataatttatgcctgactaacgtgctctatcgcgcgccggacgcgtttcgctttttgtccggcctgaacgcgctgttgccgcaggagcaggaagggaactacctctcgcactggcgggtgaatcagaatgcgttgcagcaggtgcgccagattgtggagcagatggagaacgttggcgcggatgcggatatgcacgccatcgccagccgcgagattttatttatgcagctgctggtgcacctgcgtaaaagcagcctcgccgaaggggccgccaacaacgacgcgcggctcaaccatttgatggcctggctggaagaccattttgccgaagatatctgctgggaagaggtggcggcgcgcttttcgctctccttgcgaaccctgcatcgtcagttaaaacagcaaaccgggctgacgccgcagcgctatctgaatcgggtgcggttgatgaaagcgcgccatctgctgcgccatagcgatgatagcgtgaccgatatcgcctatcgctgcggattcggcgacagtaaccacttttcgacgcttttccgccgcgaatttgactggtctccgcgcgatattcgccaggggcgcgacgccattcttcagtaacgggagagcagtcaacgttttgacagacataaacgcgaataatgaaacgttattcacgtccggagttgatgtcgtggcaggtcagctgattcttcgcaaagatgaattttttgcctctcccgctcaggcggtggcggtggcggatcgctatccgcaaaacgtcttcgccgagcacacccatgagttctgcgaactggtgctggtgtggcggggtaacggcctgcacgtcctgaacgatcgcccgtggcgcattacccgcggcgatctgttctatatccgcgcggaagataaacactcctacgcctcggtgaacgatctcgtcctgcaaaacgtcatttattgcccggaccggctgcggcttaactttgactgggcggcgcacattcccggcctgtttggcaccccgtgggttccgcactggcggattggcagcagcggcatggcccaggtcaggcaggtgattacccagctggagcatgaaagcagccgcagcgatgcgcaggccaataatatggccgaactgctgtttgcgcagctggcgcttatacttcagcgctatcgctacgccaccgataatctggcggcgacccaaagcgaagcgctgctcgataagctgctcaccgagctggcgggcagcctcaatcgtcctttctttcttgaccgtttttgcgagcgcgaagggtgcagcgaacgcgcgctgcgccagcagtttcgtcagcagacggggatgaccatcaaccactacctgcgccagctgcgcatctgtcacgcgcagtatctgctgcagcataccgaacggctgattggcgaagtggcgatgcagtgcgggtttgaagacagcaactacttttcggtggtgtttaaccgcgagataggcatgacgccggggcagtggcggcagcgcagtcgcaccgccgcctgacgacgctagttcgccattcccagaccaacgatattggcggcgataataattaccacgcagccgaggctgaggacgcccaccggacgacgaccggcgttgttccactctttcagtatcagacccaccaggccgccgcacagcacgtagaagctcatatgcagcatccagctcatgtagtcgtactgcgccggaatgctggcgtggccccaggcgtagaaaaagaactgcagataccacatcaggccgcctaacgccgaaagcaggatattgctgatgatgagcggttttgccagcgagaagtcggcttttatcgacaggttttttacttttgccagacggataaagcagaagccgaggttgaccagcgcgccgccgcccatgatcaccacatagcttggcagcgcggtgtagagcggatcaacgccgagcgcggcggcggcttcatgcatcggcttggcggcgttcatggcgaacgacataccggccgagaagatgccgcacatcaccgccagcagcagcccctttttcaggttgaagtcttcggctttgatgcccattttgcgctctttcagctggcctgcgcgggtgacgatacccacgccaatcaccgcgaccagcacgccgagcagcgtcatctggccgcctttagtgttaatgagaacatcaaactgaccgttaagaatcggcgtcattaacgtgccgacaatcagcgtgataccaatggcgatgccgatccccatcgacatccccaggtaacgcatcgtcaggccgtagttgatattaccgataccccacatggcgccgaacaggaaaacgggcagcagagtggaggcgttaaaagagccgtaataggcccagaaatcgggcagcagcatggcgctgatggcccaggggaggatcagccaggagacaataccgccgatagaccacatggtttcccaggaccaatgtttaactttcttgaacggggcatagaaacaggctgcactggccgcacctatcaaatgccaaaaaatacccatcgtaatcgcgtgattcattgattttatcctcatctattttttatcggataaatcttcttccgacccgatgagtgtaaaaatcggtcagtttttccgcctttaagctgttgccacccgaagcctgaacctggcaaccaaaaacttaattagttgttctgtatcacaaaacgacatctattacccgttgttataaccttattaaaaatacggcattgataagcgttttcaatatcatttaattaactataatgaaccaactgcttacgcggcattaacactttccgccgctcgacaataatggagatgattatgagttatacactgcctgccctgccgtacgcttatgacgccctggaaccgcattttgacaagcagacgatggaaatccatcacactaaacaccaccagacctacgtaaataacgctaacgcagcgctggaaagcctgcctgaattcgcgagcctgtccgcagaagagctgattaccaaactggatcagctgccggcagacaaaaaaaccgtgttgcgtaacaacgcaggcggccacgctaaccacagcctgttctggaaaggcctgaaaaccggtaccaccctgcagggcgacctgaaagcggctatcgagcgtgatttcggttccgttgacaacttcaaagcggaatttgaaaaagcggcggcgacccgtttcggctccggctgggcgtggctggtgctgaaaggcgacaagctggcggtggtttctaccgctaaccaggactccccgctgatgggcgaagcgatctccggcgcttccggcttcccgattatcggcctggacgtgtgggaacacgcttactacctgaaattccagaaccgccgcccggactacatcaaagcgttctgggacgtggtgaactgggacgaagccgcagcgcgttttgccgccaaaaaataaggttgcattgtgctgagcgagaagcgagtctgatgactcgctttttttatatccgcagcaaaggagcagcgatgcactatccggtgaatgtctttgtgggcaaggtaagggattatgacggcagccgtccaagcgccatcggtaaaattcaggtcgatggtgaactgacccttggcgatttggggctggagggcgatgagcaggcggagaagaaaattcacggcgggccggaccgcgcgctgtgccactatccccgtgaacactacgcccactgggcccgtgagcttccgcagcaggcggatcttttctgcgccccggcgtttggcgaaaatctctcgaccgaagggctgaccgaaaaaaacgtctacattggcgatatcttccgctggggagaggcgctgattcaggtcacccagccgcgatcgccatgcttcaagctcaactatcactttgccgtcagcgatatggcgcagcttatgcaaaacagcggcaaaaccggctggctgtatcgggtggtggcgggcgggcaggtgtccagcgatgcgccgctggcgctggtttcccggctcagcgacgtgagcgttcacgaagcgggcgccatcgcctggcagatgccgtttgatgatgagcagtaccaccgtctgctctccgcggcggggctgtcggtaagctggagccgtaccatgcagaaacggcgcctgagcgggaagatcgaaaataattcgcggagattgtgggggaaatagcgcttccgtgcgcgttcccggatggcggcgcgttgcgccttacccgggctacccgttttgaacccggcccggtgaagccaggccgggaagatcaggtgcgcttgtacagcggcagccagagggttaagcgcaggccgcccagcgggctgtcgtcggccttcacccaaccgcgatgctgttgaatcgccgcctcgacaatcgccagccccaggccggtaccgccagactcgcggtcgcgcgcctcatcggtacggtagaacgggcggaaaatctgctcgcgatcctccggactcacgcccgggccgtcatcatcgacgttcaccgtgatgccgtctttatccactgagaagcttaccgaaattttagtatgcgagtagcgcagcgcgttacgcacgatattctccagcgcgctttccagcgcattggggttaccgtacagaggccacggccccggcggatactcgacggtgaacgatttccccatctgttcggcttcaaaggcggcgttatccagcacctcgccccacagctggttggctttcaccgtttcgctcaccagcgcggttttcgcctgattgcgcgacatcaccagcaggtcgttgatcatgctatccagccggtgcgcttccatctcaatccgctccagctctttgctttccccgctgcggcggcgcagcaatgcggtgcctaactgcaggcgggtcagcggcgtgcgcagttcgtgcgagatatcggacagcagacgatgctggctggacatcatgcgctccagcgcggtcaccatctggttaaaactggtcccggcggctaaaaactcctgcggaccggcttccagttccggatgctgacgcaggttgccctgggcgacttcatcggcggcatttttgagcttacgcgcgggtttcgccaggctccacgccagccatagcagcagcggggcgctgactaacatcgtgacgatcagcagcagtagcggccggtcgaacagcagattgatgaagtctgattgtgacgtattggcaggacgaatcagatagagctggtagttatcttctccatccctgacggaaaaaggcccgaccatttccagacgaccatagcgctttttctgcggatggtcggcgttatccgcttggccgataaagttgcggataatctgcatttcgttgcgttcggcaccgataacgcgaccttcgctggtgaccagcagcaaacgctggcccggcggagcccacttatcgatggcgcgaaacagacgacgccaccacatcaggtcgtttggcggatcgttcgccagttcggcctcgacgtgctgttcaatcatgatgccctgacgttgctcgctctccagcagctcggtcatctggcgcgagtccagcttaggcagcatcagaaccagcatcaacaccagcgccagcgtgagccagaaaatagcgaagatgcgtgcggttaaacttccaatcatgaagccgataccatcagatagccgcgtccgcgcagggttttaaaccacggatggccgtctttgcgctccggcagcttgcgccgcaggttggagatgtgcatatcgatcgcgcgatcgaatggcgtcaggcgtttacccagcacttcctggctaagatgctcacgcgataccacctggccaagatgctgcgccagaagatagagcagggtgaactcggtgccggtcagctccagggtcagaccatcgaagctggcttcctggcggccggggttaaggcttagcgcatccacttccagcgtcggtgaaccggcttcggttgtctgctgctgctcgctccagtgcgaccggcgcagaatcgcgcgtatacgcgccaccagctcacgatcgttgaacggcttaggcaaataatcgtccgcgcccagctcgaggccgagaacgcgatccagctcgctcccgcgggccgttagcatgataaccggggtctggtatgtctgacgcaactctttgagcgtgtcgataccgtttttcttcggcatcatcacatcaagcaaaagtaaatcgatgctgtcgtccagaagggccagcgcctgttccccatcatgggcgacgagcacattaaaaccttccatatcgagcagctcttttaacagggaggtgagctcccggtcatcatctactaacaggattttattcattgtttaaatacctccgaggcagaaattacgtcatcaaggctcgctaatccatgactttacgttgttttacaccccctgacgcatgtttgcagcctgcatcgtaaactctctctcgttgaatcgcgacacaaacgttttgggagtatgtgatgcgcaatgttatcgctgccgtcatggcctcaacgctggcgctaagtgcatatagccaagccgctgaagtcgtcaccagcgttaactggcttcccggagacgaaggggtccagcgcagcagccagagccatatgtttgacggcataagtttaactgaacaccaacggcaacagttacgagatcttatgcagcgggcacgccacgacaggccacccgttaatgttagcgaaatggagacaatgcatcgccttgtcaccgcagaaaattttgatgaaaacgctgtacgcgctcaggcagataagatggcgcaggaacaggttgcccgccaggttgaaatggcaaaagttcgcaaccagatgtatcacctgctaacgccagagcagcaagcggttttaaacgctaagcaccagcaacgaatggatcagttgcgtgaggttgcacggatgcaaaaaggctcagcgatgatgctttcgagtagtagcaataccctgcaaccccagtaacaaccctgttttccttgccatagacaccatccctgtcttcccccacatgatgtgggggtttttttgcccgttattcagcgccctcctggctccccgtcccggtaaaagatcgggttatactaagcgcatcgcgaagtaaggagcgtttatgaatcaatcttatgggcagctggtgagccgcgcggcgattgcggcgacggtgatggcctctgcgttacttttgatcaagatttttgcatggtggtataccgggtctgtgagtattctggcggcgctggttgattcactggtggatatcgccgcctcgttgaccaacctgctggtggtgcgttattcgctgcagcctgccgatgaagaacatacctttggccatggtaaagcggaatcgttggccgcgctggcgcaaagtatgtttgtctccggctcggcgctgtttctgttcttgaccggtattgatcatctcgttcgtcctgagccgatgaatgcggcgggcgtagggatggtggtgacgctgattgcgctggtcagcacgctgctgctggtcacgttccagcgctgggtcgtaagaaaaacacaaagtcaggcggtacgggcggatatgcttcattatcagtctgatgttatgatgaacggcgcaattctggtggcgctggccctctcctggtacggctggcaccgtgctgatgcgctgtttgcattaggtataggcgtctatattttatatagtgcgctgcgcatggcttatgacgccgttcagtcgttgttagaccgtgcgcttcctgatgaggaacgccaggaaattatcaatatcgtgaccgcgtggccaggcgtcagcggggcgcacgatctacgaacgcggcagtcagggccgactcgctttattcagattcatttggaaatggaagataacctcccgctggttcaggcacacgtgattgccgaccaggtggagcaggcgctgttgctccgttttcccgggtccgatgtcattatccaccaggacccctgctctgtggtgccgttagggcggcagggtgttttatgatctttaggttatagtctgtaaactcgatgtaaaagtgtggggcggatcggcattttttgtataaattaccgccatttggtctgacctgaatcaattcagccagaagcgtttgatatactattgcaattatcgttgtgcactcctcgtgaggggcgcttcaggcaacaggattattttttgcttcctaagttcagaggtagtcatgattaagaaaatcggtgtgttgacaagtggcggtgatgccccgggcatgaacgcagcaattcgtggcgttgtgcgtgcggcattaacggaaggtctggaagtttttggaatctatgacggttacctcggcctgtatgaagatcgtatggttcagctcgaccgctacagcgtttccgacatgatcaaccgcggcggcaccttcctggggtcggcgcgttttccagaattccgcgaagaacatattcgcgccgtcgcgattgaaaatatgagaaagcgcggcctggatgcgctggtggttatcggtggtgacggttcctatatgggcgccgtgcgtctgactgagatgggcttcccttgcatcggtctgccgggcaccatcgacaacgatattaaaggcaccgactataccattggcttctttaccgcattgagcaccgtggtagaggccattgaccgcctgcgtgacacctcttcctcccaccagcgtatttccgttgttgaagtaatgggccgctactgcggcgatctgaccctggcggcagctatctccggcggctgtgagttcatcatggtgcctgaggttgaatacacgcgcgacgacctggtttcagaaattaaggcgggtatcgcgaaaggcaaaaaacacgcgattgtggcgatcaccgagcatatgtgcgacgtcgacgagctggctcactacatcgagaaagagaccggccgtgaaacgcgtgccaccgtactgggccacattcagcgcggcggctctccggttccttatgaccgtattctggcatcccgcatgggcgcgtacgcgattgacctgctgctgcagggcttcggcggccgctgcgttggtattcagaacgagaagctggttcaccacgacattatcgacgctatcgaaaacatgaagcgtccgttcaaaagcgactggctggattgcgctaagaagctgtactaagcctccggcggaaataaaaaggccttctcagagagaaggccttttttatgggcgggacgctactcgatatccagggcatcctcggagaggataatcccggtattatcggcgtagagatggtcgccggaaaagaaggtgacgccgccgaagttgacgcgcacgtcgctttcgccgataccttcacctgcggccccgacggggatagccgccagcgcctggatgccgatatccagctcttccagatcgtcaacctgacgcaccgcgccatagacgaccagcccttcccactcgttttgtactgccagacgcgccaggtcagcgtcaatcaatgcgcgtcgaacggaaccaccgccgtcaaccaacaggacatggccacggccgttctgttcgagcatatcgtagagcaacccgttatcctcgaaacattttaccgtgatgatttgtccaccaaacgacgagcgccccccaaagttggagaacagaggttccacgacgttgacatcctcctggtagatgtcacaaagctcggaagtatcgtatttcataggcttaacgttcagttgctgcgagaattttcagtatatcgcgtgaatcgtactgttggcaaaatcatcaattgttaattgatatttgtcagttaacccacaagccggctgcaaataattccgataacaaacagcaggttggtcagcagcgcccctttaaccgttctttcgagcattggacgcatggcgacagggtcgcgttcgcgcatcacataacgcgcctgtttgaccagcagcggcgttgccagcaggaacagccaaccccacggattatgcagcgagagaaggttaaacagcgccaggcacagcggcgcgccaaacagcaggcaggcgtggtagcggcgagcgttaaccggccccaggcgcacggcgagggtgtttttaccgttttcacgatcgctgtcgatatcacgcaggttgttaatattcagcaccgccgttgccagcaggccgcaggcggtggcgggtaagaaaataaccgcttcaacgctgtgcgcctggaggtaccagctcccgacgacgctaagccagccgaagaacaccagcacggagatatcgccaaggccgatgtagccgtaaggacgagtgccgacggtgtaggtaatggcggccacgatcgatagcccgccaagcaccataaaaccgataaaatcggccatggtctgccaggccaggaacagcagcgccaggccagaaaggcaaatcagcgctacggtgagtatcaacgcgcgtttcatctgcgcctgggtaattgcccctttctgcatgccgcgaagggggccgatacggtcgggcttatcgctgccttttaccgcgtcgccataatcattggccagattggagaggatttgtaataaaccggcggtgatgatggccagcagggcaacccagggatcgaagctgccctgatgccaggcaagcgcggagccgacaataatggcggcaaaggccagaggtaacgttttggggcgcaggctttccagccaggcctgggtgcgagtgatagcgtgttcggtcataagtcccggccaataaaaaatggggctctacccttcatacttcaagctgcagatgcgttggcgacgcgcattcaccccaggcactgccgggataaatgagggccctcagccaacggctgccttcccacaactcgaattatttagggtatctatagccccatctatagtgatgaaaatatattgaaccggattataagataaaacggctcaggtcttcatctgccaccagaacatccagatgcttaccgacatattccgcatcgatggtgacggtttggccattcatttcgctggcatcgtaggagatgtcttcgatcagacgctccagtacggtatgcagacgacgcgcaccgatgttctcggtggtctcgttgacctgccacgcggcctgagcgatacgcttgatgccatcttccgtgaactcgatattgacgccttcggtggccatcagcgctttatactgcacggtgatggacgcgttcggctcggtcaggatgcgctcgaagtcgtgggtggtgagcgctttcagctcaacgcgaatcggcagacgaccctgcagctccgggattaagtcagacgggctggctacctggaacgcgccggaagcgataaacagaatatgatcggttttcaccatgccgtgcttggtggagacggtgcagccttcaaccagcggcagcagatcgcgctgtacgccttcgcgggatacgtccgggccggaggagttgccgccgcgcttacagattttatcgatttcgtcgataaacacgataccgtgctgctcaacggcgtcgatggcatcctgcttcagctcttccgggttgaccagcttcgccgcttcttcttcaatcagcagcttcatcgcgtctttaattttcagcttacgcggtttttgcttctggccgcccaggttctggaacatggactgcagctggctggtcatctcttccatgcccggaggggacatgatttcaacgcccatcggcgcagcagcgagatcgatctcaatctctttatcatcgagctgaccttcgcgcagttttttacggaaagactgacgcgcggcggacggttcctgaggctgttcagcctggccccagttgtttttcgccggcgggatcagcacgtcaaggatgcgctcttccgccagttcttccgcacgatagcggtttttgtcgatggactgcatgcgcaccattttgatcgccgcatcggtcagatcgcggatgatggagtccacttctttaccaacatagcccacttcggtgaatttcgtcgcttcaactttgatgaacggcgcgttggcaagctttgccagacgacgggcgatttccgttttaccgacgccggtcgggccgatcatcagaatgtttttaggcgtgacttcgtgacgcagctcttcgttgagctgcatacgacgccagcggttacgcagagcgatggcgacggagcgcttggctgcgtcctggccgataatgtgtttgtccagttcgctgacaatttcgcgtggggtcatttcagacatgggagatccttacgctttagacggtaattcttcgatggtatggaagtggttggtataaatgcagatatcacctgcaatattcaacgctttctctgcgatatcgcgtgcgcccatatcggtattttccagcagggcgcgagccgcggcctgggcgtaaggaccgccggagccgatagcaatcaaatcgttttctggctgcaccacgtcaccgttaccggtgatgataagcgatgcgttttcgtcagccacggccagcagcgcttccagcttgcgcagcatgcggtcggtacgccagtctttcgccagctcaacggcggcctttaccaggtggccctgatgcatttccagcttacgttcaaacagttcgaacagcgtgaaggcgtcagcggtgccgcccgcaaagccggcgatcactttgtcgttgtacaggcggcgcacttttttgacgttgcctttcattacggtgttgcccagcgtggcctggccatcaccggcaataacgacatggccgttacggcgaacacttacaattgtagtcacgagcagaccccttggttgcaaaagcggaataggggccccgcggttacgcggggcagaatgcaattatagatgggggggattttgagggtttcaacccctggcggcgagacgaatgcagtttgcgtgtccggccattttcagccgttcaatcatattgctggcgttttctttgcctttcagcggcccaattaccacgcggttccagccgttattggtggtgatgtgcgaggcgaagccttcaaacgccagctgcgcgcgtacggtttccgcctgctcagcgcctttaaaggagccgcactggatcatccagctgcgatcgtcttttttctccgcggcggcggtttttggcgcctcttcaacgcgggttaccggcgcggcggcctgggttttaggctgcgcggtactggtatgcgccggcgtttgcagcagatcctgatacggctgctggttcgacgccgtttgcttcggcggctgctgcaccggtttcggctgctcgacggcccgcggctgggttcgcggttgctgtacctgcgtctgtgtctgctgctgcacctgcgcgagctgctgctgctgaactaaacgctgacgctgcagggtctgctggcgctgcgccggggtttgttcattccacggcacttcggtcagctgcgtaggctgctgacgcatatcggcctgcatttgcgccaacagctggcgctgctcgtccgtcagctgctccggcttcatgacttcgccgcctgccgtgggttccgtaggcgcacgaacgccgggctgacggctctccagctctttaatatagcgccagcgctcttccggcttcggcgggaggccgttgccagcggcctggcgattttgcagcgcttcagcctcttctttcttgtggtgcgtgatgaagtacagtccaccgataaaggccaccagcactgccgcagcgatcgccaccatagtcggtgaaaccgccgaaaggccgccttgcttgttccttgagcttcgggtattgctctttttgcgccgcgaagaagccggttggctgcggcgtacataatctcgttgtgccactatcgtttcgctgtcttattcgtttttcagcccgccatgttacttaagcggcgggcctttgaccagaagggcaggcccgaaagcctgaaggttatgttcggatttttcgcgtactgccgcgaacgataagctcgcagtcgagtaatcgtgaaccgctgctgacgctgtgaccgtgcagttgatccaataaaagcagcatcgcttcgcggccaatatcaaaacgtggttgcgcgacggtcgtcaatggcggatcgcaaaattcagacaaagagatgttatcgaaaccaataatagacagatcttcaggaactttcaggccgcgacgtttcgccagcgataatgcccccagcgccataatatcgctatggcagaaaacagccgtcggcggtaccggcagcgccagcagctgttcgagggcgttggcgccggcttcataggtaaaattgccgcgggcgatatagtgcggatcgacggttatcccgctacgacgcagcgcctggacatagccctgcaggcgataatggcacagcggcatctcttccgggccggcgatacagccgatgcggcgatgccccagctcgtgcagatagttaacggcgttaaaggcggcggtgaggttatcgatatgcaccgtcggcagctcaagctcgggagcgaattcattggccatgaccatcggcggcagattgcgctgctcctctacgcccgcatcgaagggcaaacgggagccaagcagcagcataccgtcgatctgcttggtaatgatcaggtcgataaaggtcttttcctgacggttctggtgggcgcaatcgccaatcagcaccaggtactcctgttccgccgcggtgacttcaataccgcgaataatctcgctgaaaaaggggtcgcagatatccggcacaatcaccagaatggtgcgtgactcgttgcgcttcatattgcgcccgagcgattgcggtaaatagccgacttccagcgcggcctgctcgacccggttacgggtgctctgcgaaaccttatcgggattcattaacgctcgggatacggttgccgtggaaacgtttgccttttgggcaacgtctttcatagtggcggcaacgacctgttttttgggcttcacctgatttctcctcgctgactggcgcagacacatccctggcgttctgacatcagcaacatttttaacagatagtacatccagagagttacagaattttcatgaaaaacgtgacgatggttgaatttttcgatccgcctcgcaagagaagccttaaccttcaataggatcgacgtccagaacccatttcacttttcgcgcttccggcagcgtgttaatcaacgccagcgttccgctgacgatatgctgtagctgaacgcgcgacggatgctggaggagaatttgccagcgccagcggccgccacgctttggcgccagcgccggaaccggcccgagcacccacagtttcttatcggccagcgggctggcctgcagcaggttgcgcagctgttgtaaaaaaagcggcgcctgctggttgttatgatcctcggcgcgaatcagcacgtggctggtccacggcggcagctgcatgctttgccgttccgccagcgcctgctcggcaaacgcgtcgtatcctttataaagcagcgtttgcaacagcgggtgttccgggtggtgggtctgcaggatcacctcgccctgtttgcccgcccggcctgcgcggcctgaaacctgcgtgtagagctgagcgaagcgctccgccgagcggaaatcggcggaaaacagcgcgccgtcaacgtccagcagggaaaccagggtgacatccgggaagtggtgccccttcgccagcatttgggtgccgataagaatgcgcgcgccgccgcgattgacgtcggcaagatattgctcaagcgcgcctttgcggctggtggtatcccggtcgatacgggaaatcgggatagcgggaaacagcggtcccagcgcctgctcaagctgttcggtccccaaacctaccggtaccagatgcgttgagccgcaggaggggcactggcgcggaatcgggcgctggctgtcgcagtggtggcagcgcagatgatgctgagcctggtgcagcgtgtagtagctgtcgcagcgcggacactccgctatccagccgcagtcgtggcacagcagcgccggcgcgaagccgcggcggttcaaaaacagaatcacctggttatcggcctgcagatgctggcgcatgcggccaatgagcgccggagacagtccggcctgcagctgctggccctttaaatccagaacgtgctgctgagccgggcgcgcattgcccgctcgtttagtgagcttcagctggcgatacttgccctggcggacgttatgaagcgtctccagcgccggggtcgccgagccgaggataattggaatttgttcgctgtgggcgcgccagaccgccagatcgcgggcgtgatagcgccagccttcctgctgtttataagagctgtcgtgctcttcatcgatgacgatgaccccgaggtctttaaaaggggtaaatagcgacgagcgggtaccgatcacaatcgccgcttcgccgtttttggcttttagccacgcggagaggcgttcgctgtcgttcagtccggagtgcagcacttccaccggggcgctaaagcggtggcggaaacgggcgatagtctgcggcgtcaggccgatctccggcaccatcaccagcgcctggcgcccctgcgccagtacgttttcaaggacgctcagatacacttccgttttgcccgaaccggtgatcccggccagcagccaggcggaaaagctgtccgaggcgctgtgaatcgcgcccacggcggtggcctgttcggtattgagccgcaggcgctcgccgggtaccgagaagcccgtgcgccagtcggcgatcgcgggcgcttcgctggcgagttcggccaggcctttaccccgcagcgcctgcagggcggcgtcgttaaattcgagttcggcaacctgatggcgccagatcttgccctgacgcagcgcagccagcgcctgctgctgtttcggtgagcgcttaaggctgttgatatcaaccgcttgcccctgttcggtggcaaaccagtaccacattggcgccgcgctggcgggcttcccctggcgcagcacgatcggtagcgcgtgaaacagcacatcgccgatgggatgatggtagtaatccgccgcccacagcagcagccgccagaccgaagcggagaagaccggctcggcgtcgagggcttcggccaccggcttaagttcgtcgagcggcagttcgctgcgctcactgaccgccgttacgatacctatccgctcctgcttgccgaacggaacgcgcacgcgacagcccgctttgaccggcataccgtcaggcagcaaatagtcaaaagtgcggggcagcggaacgggcagggcaacgtgagcgacgggcatttaatcttcctgacttgaaatctggcgggttagtatacacattgtgataagggctcgcggatcagtttgcatatgctggtcaaattctgtatgattcgccgcctttgatgcgctttgtgcgacatcaaaatctattacccggtagtgtaatcgctccgggaattattaacatcgcgtggtgtctggcgttagggctggaagagcgacgcggccttaactgaggttctcccatgaaaaaagatattcatccgaaatacgaagaagttactgcttcctgctcttgcggtaacgtcatgaaaatccgttctaccgtaggtcacgacctgaacctcgacgtgtgcggtaaatgccacccgttctacactggcaaacagcgtgatgttgctaccggtggccgtgttgaccgcttcaacaagcgcttcagcgtaccgggtaccagcaagtaatttgctgaagaagccgcctcagggcggcttttttgtttctcttgcgctaaacgcgagaaaaaagggcagaagatttcttctgcccttttttatggttttagtattcccacgtatccgggtcgatgcccagttcgcgcataatctctttcgccgcttccgggatttcatcgctgcgctctttacgcaggtcttcatcgttaggcaacggttgaccggtaaaggcatgcaggaacgcttcgcacagcagttcgctgttagtcgcgtgccgcaggttattcacctgacgacgcgtgcgttcatcggtgaggatttttaacaccttcagaggaatggaaaccgtaattttttttacttgctcactcttcttaccgtgctcagcgtatgggctgatatattcgccgctccattcagccatgagttacctttaatcctctattcattagttaagggcctgaacgcgagtcctggccataattgcgcgtagtttaccgtagaggggcgcgtctggcaccaaacaagccgctacggatgtgcgctaatgcatataattttaacggctatttccagtttgctcaatctatacgcaaagaagtttagatgtccagatgtattgacgtctattataacaatgattactctgaagcctgacttttcaccgactcagcccaggaactccccaacatgacgcgtaaacaggccaccatcgcagtgcgtagcggtttaaatgacgacgagcagtacggttgcgttgtcccgcccattcatctctccagcacctataatttcaccggatttaacgaacctcgcgcccacgactactctcgtcgcggtaacccgacccgtgatgtggtgcagcgtgcgctggcggagctggagggcggcgcgggggcggttctgaccaataccggcatgtcggccattttgctggtcaccaccgtatttctgaaaccgggcgatctgctggtggcgccgcacgactgctacggcggcagctaccgcctgtttgacagcctggcgaagcgcggctgctatcgcgtgctgtttgtcgatcaaaacgacgagcaggcgctgagcgccgcgctggcggaaaaaccgaagctggttctggtcgaaagcccaagtaatccattgctgagagttgtggatattgcgaaaatctgcggtctggcgcgtgaggccggagcggtcagcgtggttgataacaccttcctgagcccggctttgcagaatccgctggcgctgggcgccgatctggtgttgcattcgtgcactaaatatttgaacggccactctgacgtcgtggccggggtggtgatcgctaaagatccggcgaccgtcaccgaactggcatggtgggcgaataatatcggcgtcaccggcggagcgtttgatagctatctgctgctgcgcggcttacgtacgctctctccgcgtatggaagtggcgcagcgtaacgcgctggcgattgtcgactatctgaaatcccagccgctggtgaaaaaactgtaccatccgtccctgccggaaaaccaggggcatgagattgcggcgcgtcagcaaaaaggttttggggcgatgttaagcttcgaactggatggcgatgagcagacgctgcgtcgtttcctgagcgggttatcgctgtttacgctggcggaatcgctgggcggcgtggaaagtctgatttcccacgcagcgacgatgacccatgcgggcatggcgcctgaggcgcgtgcggccgccgggatctcagaaacgcttctgcgtatttcgaccggtattgaagatggtgaagatttaattgccgacctggaaaatggcttccgggcagcaaacgaggaataaacatgagtgtgattgcgcaggcaggggcgaagggtcgtcagctgcacaaatttggtgggagtagtttagcggatgcgaaatgttacctgcgcgtcgcgggtattatgacggagtattcgcaggcgggcgacatgatggtcgtctctgccgccggcagtaccaccaaccagttgatcagctggctgaagctcagccagaccgatcgcctttctgcgcatcaggtgcaacaatcgctccgtcgttatcagatggagctcatctccggactgctgtcaccagacgctgccgacacgctgattgccatctttattcaggatcttgagcgccttgccgggttgcttgacggcggcgtcaccgacgcggtatacgccgaagtcgtcggtcacggcgaagtctggtcggcccgcctgatggcggcggtgctgaaccatcttggcgtagaagccgcctggctggatgcgcgtagcttcctgcgcgccgagcgctccgcgcagccgcaggtggatgaaggtttatcctatccgcttttgcagcagctgatagcgcagcacccgaacaagcgtctggtggtgaccggctttatttcgcgtaacaacgccggggaaaccgtcctgctggggcgtaacggttccgactattccgccacccaaatcggcgccctggccggggcgtctcgcgtcactatctggagcgacgtggccggggtctacagcgcggatccgcgtaaagtgaaagacgcctgcctgctgccgctgctgcgcctggatgaggccagcgaactggcccgcctggcggcgccggtgctgcatgcccgtacgctgcagccggtctccggcagcgatatcgatttacaattacgctgtagctacaccccggatcagggctcaacgcgcatcgaacgcgtgctggcttccggtaccggggcgcgtatcgtgaccagccatgatgatgtctgcctgattgagttccaggtacccggcggccaggatttcaaactggcgcataaagagctggacgctatcttaaaacgcgcccagctgcgtccgctggcggttggcgtacacgccgaccgtaagctgctgcagttctgctacacctctgaagtggccgacagcgcgctgaagctgctggacgaagcggggctgccgggcgagctgcgcctgcgtcagaaactggcgctggtggcgatggttggcgctggcgtgacccgcaatccgctgcactgccaccgtttctggcagcagctgaagggtcagccggtagagtttacctggcaatcagaagagggcatcagcctggtcgcggtgctgcgcgccgggccgacggaaagtcttattcaggggctgcatcagtcgttgttccgcgcggaaaaacgcattggcctggtgctgtttggcaaaggtaatatcgggtcccgctggctggagctgttcgctcgcgagcagaccacgctttccgcccgcaccgggtttgaattcatccttgccggggtcgtggatagtcgccgtagcctgcttaattacgaaggccttgacgccagtcgcgcgctggctttctttaatgatgaggccgttgagcaggatgaagagtcgctgttcctgtggatgcgcgcgcatccgtacgatgatttagtggtgctggacgtaaccgccagcgcgcagctggccgaccagtacctcgatttcgccagccatggtttccacgttatcagcgcgaataagctggctggcgccagcagcagcagtaagtatcgccagatccacgacgcgttcgagaagaccgggcgccactggctgtacaacgccaccgtcggcgccggtttaccggtcaaccatacggtgcgcgatttgattgatagcggcgataccattctggcgctgagcggtattttctccggcaccctctcatggctgttcctgcagtttgacggcaccgtgccgtttacagacctcgtcgatcaggcctggcagcaggggctgacggaaccggacccgcgcgtcgatctctccgggaaagacgttatgcgtaagctggtgatcctggcccgtgaggcgggttacaacatcgagccggatcaggtgcgcgttgagtcgctggtgcccgcccactgcgaagaggggtctgtcgatcacttctttgagaacggcgaagcgctgaacgagcagatgctgcagcgtctggaagcggcgcgcgagatgggcctggtgctgcgctacgtcgcgcgctttgatgctaacggtaaagcccgcgtcggcgtggaagcggtgcgcgaagagcacccgctggcggcgctgctgccgtgtgataacgtctttgctatcgagagccgctggtatcgcgataacccgctggtgatccgcggtccgggcgccggtcgcgatgtgaccgccggggcgattcagtcggatatcaaccgtctggcgcagctgctgtagccataagtcaaagaccaggcaacgcctggtcttttcaccttagtgcgccgcgaagacttctttggcggcaaacaggccattcagggccgccgggaatccggcatagaccgccatctgcatgatcacttccgtaatctcttcctgcgtcagcccgacatttaacccggcggcaatatgcacttttagctgcggcgcggcattgccgagcgccgtgagcgcggcgatagtggcaatttcacggctgcgtaaatcgagccctggcctggcgtaaatatcgccgaaggggaactcaatcagatagcgggcaaaatcgggggcgatatccttcaggctgttgacgacggcgtcgccgcctttgccgtccacgcgctgtagcatttctcgtccgatggtataacgttcgctggtcatggcttttcctcagtgtgatgatgcgtaatgaggaaggttagggaagttttcctgacttgagtaatacccttttcgtgataccttttcagtatgacaaattcacgtttacacactctggatattcgcctgctgcgctactttgcggtggtggcggaggaaaataacatcagccgggccgcgcagcggctatttatttcgcagccgccgctgagccgtcatattcgccatctggaaacgcagctgggggtaacgctattcttgcggcataccaaaggtctgatccttaccgacgagggaagacgggtgctggatatcattcggcctctgctggcgcttcaggatcgcaccctggcggcgttgagccagctctctgcgcccgcgcagcagcctctgcgtctggggttgaccaccgcctttgagcaaggcgttttcgccgccgcggaatccgctctgggtgagtacaccggcgcattgcacatcactcgtcagtcatcaccggcgttggcccaactggtgcgaaagggcaagctcgatgcggcgctggtggcgctgccgctgaataccgaggggcttcacctgcatccgttgccgtatggcgagccgcttatcgcggcgctacccgcatcctggccggaggccgccagggcggagctgacgttaagcgcactcaatcatcggccgctgttctggtttccacgcgagcgtaatcccgatttttttgactatacgcgacgtatttttgaccgggcaggctatgtgcccacctacgtggaggagcctgccgagcatgatgttctgctggcgcggattgcgcgcggagaaggcctgatcctcctgccggcctctttttccgcgattcagcggcagggggtcgtcttttgtcctttgcaggatgccagccagcagcttccgcttaggctgggaatggtgacgctgcccgcaaatgagagggtccgggaaagggtaacagcagtcgttgaaaaatcattgccttagcgaaaaagagatgaattaatttcatcctggctgaatattcctcactgtttacgctgatttttctattgacgcggatgcccttttccgtcatttttacatctggacgtctaaacgtatagaagttcgcgacacaacaaacaataaaatgcgattgatgaggtaaggtatgagcttttttcacgccaatcagcgggaagccctgaatcagagcctggcggaagtgcagggccagattaacgtctcctttgaattctttccgccgcgtaccagtgaaatggagcaaaccctctggaaatccatcgatcgcctgagcagcctgaagccgaagtttgtctccgtgacctacggcgctaactccggtgaacgtgaccgcacccatagcattatcaaaggtattaaagagcgtaccggtctggaagccgccccgcatctgacctgtatcgatgccagccgcgatgagctgcgtaccattgctaaagattactgggatagcggaattcgccatatcgttgcgctgcgtggcgacctgccgcctggcagcggtaagccggatatgtacgcggccgacctggtgactctgctgaaagaggtcggggactttgatatttccgttgcggcttatccggaagtccatccggaagccaaaagcgcgcaggccgatctgcttaacctgaagcgcaaggtcgaagccggagcaaatcgcgcgattacccagtttttctttgatgttgaaagctacctgcgttttcgcgaccgctgcgtctctgcgggtatcgacgtcgaaattattccgggcattctgccggtctctaacttcaggcaggcgaaaaaatttgccgatatgaccaacgtgcgtatcccgacgtggatggcgaaaatgttcgaaggtctggacaatgacgccgaaacccgccagctggtgggggcgaacatcgctatggatatggtgaagattctcagccgcgaaggggtgaaggatttccatttctataccctgaaccgcgcggaaatgagctacgcgatttgccacactttaggcgtgcgcccggcgtaagcaggcttcagatttccccgtccttctcttctctctgcggcgtcaaaacatcttcggcgccgcttgttctggttatttccttaaaacatcttttctggcggtaaaacggggcgcctgcgccatcagaggtgactatccgccagcagcagcggtacgttttgcgtttgcatcagagagaggatatcgggggagaggccggtctggctgataacgaggtcaaggtctgccaggcgggcatggcctgcaaggaacgtttgaccaaatttactgctgtccgccagcaggattttttgccgcccggcgcgcatcagcgcttgtttgacgtgggcatcggtcatttcaggaaccgtcagctctccaagatcgttgacgccctgagtgctgaggaagactttgtcggcgtggatatgacgaaagaagtcggcggtactgaaagagaccattccctggctggcgtcttcatattcaccgggcgcgacgatcaacttgatattttttcttcctttcaggagattaaccaccggaatggagttggttatcaccatgattttcttatcgaaaataaaatgagcgagcgccaacggcgtggtgccgcagtcgataataatcgtgtcgccatcttcaacctgctcggcggctttctggccaatcaggtgcttatcatcggccatttgtatcgattgcagctgaaagccgggctcgacgctggcgccgcgggttaagtaggctccaccgtaggttgtttttacaatgccttgtttttcaaagaaagagagatcgcgacggatggtcattttggtgacgccgaacttttcggcgaggtcattgacgacgacttttttgtcctgttgcaaaatggcgtaaatgctcattcttcgatttgatgactgcatatctacgattcacccaaaggaaaatcgcactataaaatacatcgttttggcgggcaatggtgggcgaaaagaacatacccgcctgctggcgggtatgtcgcgaggggttattcccactcttgcaggaagcgttgaccgtactggtcggccaccagaagcgcggcatagacctgatccggcgtcgcgccgccgggcatattgtggatggtttcaccttccgcgcaggcggcttccgccacggtacgcattttgcccgggatatcgactttaatatccagctgcgccagggtgataggcagcccgacgctatggcacagcgccgctacggtttcgatctcttccaccggcgcgttttccagtaccagctgcgtaagcgtaccgaaagccactttttcaccatgatagtagtggtgagcgtccggaatagcggtcagaccgttatggatagcgtgcgcagccgccaggccgccgctttcaaagccgacgccgctcagataggtgttggcttcaatcacccgttccagcgccggcgtcaccacgtgctgctccgccgccagcatcgctttttcgccctcttcaaccagcgtgttgtagcacagttcagccagcgccagcgccgcctgggtgcattttccgcccgccatggtggtcgcgccgctgcgggagcaggcacgcgcttcaaaccaggtcgccagcgcatcaccgataccggctgccagcaggcgcgccggggcgccagcaacgatttgcgtatcgacaatgaccatgttcgggttgcgcggcagcatcaggtagctatcaaactcgccgtcatcggtatagatgaccgagagcgcgctgcacggcgcgtcggtggaggcaatcgtcggggcaataaccaccggcagattcataaagtgtgctaatgcttttgcggtatccagcgtcttgccgccgccgatacccagcacggcggtgcagcgggcggaaccggcaatatcacgcaagcggttgatttcgttatgtgagcattcgccgccaaacggtgcgatttcgccagccagccccgcatccgccaggcttttacgcagtttttcttcggcaaaaccgagtacgaatttatcgcccacgatgagccagcgttctgccagcggctttaggtatccaccaaggcgggtaatgacgtccgcgccctgaatgtacttaccgggtgattgaataatgcgatccatttctattcctcctggatgaccgtgatgccaccctctgggcagctcgccgatcgggttacaggtttagcgttccaaaggcgttattccagtcctgctcaaacttctcaatagctgactctaccgcaggggtaccgagcatttgttgcgctacatctaacggaagggtgatcgcttcgcagcctgctaacaggcaatccagcgcctggcgcggcgtcttaaagctggcggccagcactttgctttccggcgcatgcagctccagcagggactgtagctcctggaccatgcggatgccgtcaccgccctgggcgtcgacgcggttgacgtacggcgccacatattttgccccggccagcgcggccagcaggccctgagatgcgctgtataccgctgtacccagcgtggggataccttcttttttcaacagcttgatagcggcaaggccttcggcggtgaccgggatttttaccacgataccggggacggcgttgctcaggcgtttggcttcttccaccatgccctgcgcgtcgcggctcatggtctgggcgaacagaataccttccggaccgacggctttttgcaggcgcggaagaacatcccaaaccggcgttttaccggctgcgataatgctcgggttggtggtcacgcctgccagcgggtagatgcgcgccaggcgttcaacttctgctacgtttgcggtgtccagatagagttccatgatgctttcctcaatgcttaattcggtagtgtcgttgaggaaagaatacggctttcacgcgaagggtcgccagatgacaaatttgccaaaaactggataaatgtacgcattgcggttaaggatgatttagatcacatttatcccgcaacccggattaaaatgggaaaacaagaacgcacaaaagtcaggtttaacacacaaaaatctagttttttagcgaagccgttttttccgtcagctggctgtgatactgacggcgatactccgacggcgagcgctcggtgtttttgcgaaacaggcggcagaagtagttgctgtcggcgaaaccacaggcgtgggcgatatctttcactttcatatcgtggccttttaacagcattctggcctgctccagacggatgtgattcaggtattcgttaaagcccattggcccgcatttctggaacaaatgggaaagatagtttggtgagagataaaacgcctgcgccaccgactcgcgggttaacgggtcggcaaaatgggtatcaatatgtttacgaatcgcttcaaaaagcgcctggctgcgcgatgacgtttgtacctggctgcccagcagatcggcacagtggctgagcaggctggtgacaatacagcgggccgtgtgctgttcctgcggctgcatctgcatttcattcagcgcctgcagcagaaacgatccaacccgggggccgcggcgaggaacctgctgtttatccagcacgttaagcgcgctgccgtcccagtggcgtaggacgaattccagctgctgcttaccaaacaagacagttaacagcgtggagggcatcagccactgcgggtcattccatccgcctgcggggacgtacagcacatcgtgcggcgtcagctgcgcctggtcggccttaatcgccggatcgcgaagctggcccgcaagcatgatttcgaggcgcggaaaatcgacgcttagcgctttctcagaagccggcctggattctgtggaaaagtggactttgccgattaccgccgggcctttaataaaagaatcaatggcctgattaatgtcgctatccattctctctccgcgttgcgcgatcccgtttcatcatacctaacaaactggcagagggaaaagccgcgcgatttttctgcgaagagagttgtaagatttgattgatatgttatatcgtaacatattattgcaaaccttaactcaggagagagtgatgacccgaaagatttccgcacttatgcttggtattagcctggtactggcgaacagtcaggcggttgcccacggccaccatagccatggcccggcgctgaccgaagccgagcagaaggcgagtgaaggcatttttgccgaccaggacgtaaaggacagggcgctgagcgactgggagggtatctggcagtcggttaatccctatctgctgaacggcgatttagatgccgtgctggagcagaaggccaaaaaagccggtaaaagcgtggcggaatatcgggagtactataagaagggctatgccaccgatgtggagcagattggtatcgaagataacgtcatggagtttcacatcggaacaaccgtcaatgcctgtaagtacgcctattccggctacaaaatcctgacctacgcatccggtaaaaaaggcgtgcgctacctctttgaatgccagcaggcggattcaaaagcgccgaagtttgttcagtttagcgatcacaccatcgcgccgcgcaagtcccaacatttccatatctttatgggcaatgagtcccaggaagcgctgctgaaagagatggataactggccaacctactatccttatgcgctgcataaagagcagattgtcgacgaaatgctgcaccactaataaaaaagctccggtaaacgcgatgcttaccggagctatggtttttaacccggctcgcgctacgcttagccgggctacaggtttctcaaggcgaactagccggtgttacgcatgcctgccgcaacgcctgcgatggtgaccatcagcgcttgctcaacgcgcgggtccggtttttcacctttctcttccgccagacgtgaacgatggagcagctcggcctggagcacgttcagcgggtcggtatagatattacgtagctggatggactccgcgatccacggcaggtcggccatcaggtgggagtcgttggcgattgccagtaccacgttgatatcggcggacagcagttcacgcagctcttcgcccagcttccacagttccggtttcaccagacgctgatcgtaatattccgccagccacaggtcggcttttgagtagaccatttccagcatgccgaggcgggtagagaagaacggccagtcgcggcacatgctttccagctcgctctgcttgccgccttcaacgactttttgcagcgcggcgccggcgcccagccaggctggcagcatcaggcggttttgcgtccacgcaaagatccacggaatggcgcgcagcgactcgacgccgccggtcgggcgacgtttggccggacgcgagcccagcggcagtttgcccagctcctgctccggcgtcgcggaacggaagtaaggaacaaaatctttattttcacgcacgtagccgcgatacatctcgcaggagacgtcggacagctcggccatgatgtcgcgccattgcgcttttggctccggcggcggcagcaggttggcttccagaatcgcgctggtgtagagcgacaggctgctgatggtgacttccggcaggccatatttaaagcggatcatctcgccctgttcggtaacgcgcaggccgcctttcaggcttcccggaggctgagagagcagggccgcgtgcgccggggcgccgccgcggccgatagaaccgccgcgaccgtggaacagcgtcagctcaatgccggctttttcacaggtcttaattaacgcgtcctgcgcctgatactgcgcccaggaggcggccatcacgcccgcatctttcgccgagtcggaatagccgatcatgaccatctgcttgccctggataaagccgcgataccagtcgatattcagcagctgggtcataacgtcgtcggcgttattcaggtcgtccagcgtttcgaacagcggggcgaccggcagcgcgaagccgatgccggcctctttcaacagcagatgcacggccaggacgtctgatggcgttttggccatcgaaatcacgtaggccgcaatagagccgcgcggcgcttcggagatgactttgcacgtctcgagcacttcgcgcgtttcttcgcttggctcccactggcgcggcagcagaggacgcttggagttcagttcgcggatcaggaaggcctgtttatcggcttctgaccagctttcatagtcgccgatgccgagatagcgggtcatttcgcccagcgcttcggtgtggcgggtgctttcctgacggatatcgatacgcaccagcggtacgccaaaggcttttacgcggcgcagggtatcgagcagctcgccgttggcgataatgcccataccgcaggcttgtagcgactggtaacaggcgtaaagcggttcccacagctgctcgttttgcgtgataaggcccgccggtttcggcagtttctgtcctttcaggcgcgcttccagccaggcctgagtctccatcagctgcgtgcgcagttttttcatcaggtaacgatagggttcctgagcgccttccgcgcctgccagctcacgcagctcgtcggtgcactcaaccatcgacagctcggaaatcagcagctggacatctttcaggaacagatcggttgccttccagcggctgagcagcaggacgtggcgggtaatgtcggcggtcacgttcgggttgccgtcgcggtcgccgcccatccaggacgtaaagcgaaccggaacaaaatcgaccggcagccgatagttcaggttatcttccagctgttcattcagctcgcgcaggtagttcggtacgccttcccacaggctattttcgacaaccgcgaagccccatttggcttcatccaccggggtagggcgatgcttgcggatttcatcggtgtgccacgactgggcaatcagctggcgcagacggcgcatgacctgatgacgttcatagtccgcaatgtcgttgttatcgagctgcttcaggcagctgttgatctcgcccatcttgtggatcagcgtacgacgcgtgatttcggtcggatgcgcggtcagcaccagctccagcgacagggattcaacggcttgtttaataatcgtttcgttgagattgggttgctctttgagctttctcagggtgcgggcaatcacttccggattactggccgcttcgccttttggcgaaatgctgtggtattgctcagcggtattcgccaggttcagaaactggctaaaggcgcgcgccaccggcagcagctcgtcgttggacaagttttgcagcgtggtgagcagctcctggcggttggcttcattgccagcgcgagaagatttggacaacttacggatagtttcgacacgatcaagaatgttttctcccagcgcatccttgatggtatcgcccagcaccttaccgagcatactgacattactacgcaaagcggaatattgttcgttcatgttaccccagacaccccatctcattttattttgttatatccggcgctcgataatttgagcagtggataagcaaccgtctttataaagccacgtaaaaacccccacgtcaattgttgcgaaatcgcttcagcaaacgaataaatggcggcaatttgcgaaatttaactcggaggtcgcttgataagcgttgcttatgaaaatgtgataattgtcaccctctcgcgccgataaaatcgcacgagagaatgggtatttaatgccagcaaaaatggtgaaccacctgagtgatgagctcgcgggtcggcttaataaagcgcgtttccaggtactcatccggctggtgggcctggttgatagagcccgggcctaacaccagcgttgggcagagggtctgaataaacggcgcttcggtacagtagttgaccacgtcggtttgcgcgccgaggagtttttcgacgacctcaaccagcttatggtccggcggacattcgtaaccggggatcggcggatgcagttcagcaacggtcaggcgaccaggccaacgctcgctcaccggcgccagcgcttcgttaaggagcccgttgagatcgttgagcgtcattccgggcagcggacgaatatccatatgcagttcgcagcaggcgcaaatgcggttggaggcatcgccgccgtgaattgccccgaggttaagtgtgggatacgggacggtaaacgcggcgtagtgataacgctcttttaaatcgtcgcgcagctgcatgatgcggccaatggcgtcgtgcatcagttcaatcgcgttgacgccgcgtgccgggtcgctggagtggcccgactgcccctgaatgcgaaccgcgttggacatgtggcctttgtgcgcgcgtatcggctgcagcgacgtgggctcgccgataatggcgcagtccggtcgcagctgggtcgtctcggcgaagtagcgggcaccggccatgctggtctcttcatcggccgtcgccagaatatagagcggctttttcagctgagtgacgtcaacgtcgcgcagggcgtcgagaataaaagcgaagaagcctttcatatccgcggtgccgagaccgtacagcttattgtcgtgctcggtcagggtaaaagggtcgcgggtccagcggccatcatcaaacgggacggtatcggtgtgcccggcaagcagcaggccgccagcgccgtggccgctgctggccagcaggttgaatttattacgcgtgtccgggactggctgaacttcaacattaaagccgatatcgcggaaccagcctgccagtaaattgattaaagactcattgctttgatccagcgcctcttcggttgcgctgatggaaggtgtggcgatcagcgcgcggtaaatctcgataaagggcggtaatttgtttttcattgttgacacacctcgggtcgtgatagtatcaatattcatgcattatttgtgaataaaaatacattatcgttgagcgtaagaaaacccatcgaatgtaaggatgatgctcttacggctcaacagggtggggaaggcaacggtcttccagggcaaatatacgtaagcaagaaggtgaagagccccaatgttgaacacgctgattgtgggcgccagcggttatgccggcgcagagctagtggcctatgtaaatcgccatcctcatatgaccataaccgcattgacggtctccgcgcaaagcaatgatgcgggaaaattagtttccgatttgcatccgcagctgaaaggcattgtcgatctgccgctgcagccgatgtccgatatcagcgagtttagccccggagtcgatgtcgtttttctggctaccgcgcacgaggtaagccatgacctggcgccgcagtttctcgccgctggctgcgtcgtgttcgatctttccggggcgttccgcgttaatgacggcgccttctatgaaaaatattacggtttcactcatcagcaccctgaactgctggagcaggcggtttacggcctggccgagtggagcgtcgaaaagctaaaagaagctaatctgatcgccgtaccgggctgctacccgacggcggctcagctatcgttaaaaccgctgatcgacgcggggctgctggatcttaaccagtggccggtgatcaacgcgaccagcggggtcagcggcgccgggcgtaaagcctctatcggcaatagcttctgcgaagtcagcctgcaaccctacggcgttttcaaccaccgtcatcacccggaaatttcaacccacctgggcgcggacgttatttttactccgcatctgggcaattttaagcgtgggattctggaaaccattacctgccgtctgaagcctggcgtgagcaaagagcaggtggcggcggtattccagcaggcctatgcggataagccgctggtacgtttatacgataaaggtgtccctgcattgaaaaatgtcgtgggtctgccattctgtgatatcggttttgcggtccaggatgaacatatcatcgtggtggcggcggaagataacctgctgaaaggcgcggccgcgcaggccgtgcagtgcgcaaatattcgtttcggcttcgctgagacgcagtctcttatttaaggtgtgatgatgaatcctttaattatcaaacttggcggcgtcctgctggacagcgaagaagcgcttgagcgcctgtttacggcactggtgaactaccgcgaatcccatcatcgcccgctgattattgtgcacggcggcggctgtgtggtggatgaactcatgaagcagctcaacctgccggtgaacaagaaaaacggtctgcgggtcacgccggcggatcagatcgacattattaccggcgcgctggcgggaaccgccaacaaaacgctgctggcgtgggcgaagaagcacggcctggctgccgttgggctattcctcggcgatggcgatagcgtcaaagtgacgcagcttgatgaagagctgggtcatgtcggattcgctcagccgggttctccggcgctgattaacacgctgctggctggcggatatatgccggtcgttagctccatcggcgtcaccgatgaaggcgagttgatgaacgtcaacgccgaccaggcggcgaccgcgctggcggcaacgctcggcgcagacctgattctgctgtctgacgtaagcggcattctcgatggtaaagggcagcgcatcgcggaaatgaccgccgagaaggctgaacagctgatcgagcagggcattatcaccgacggcatgatcgtcaaagtgaatgcggccctggacgcggcgcggacattaggccgcccggtcgatatcgcctcctggcgccacgcggagcagctccctgcgctgtttaacggcacgccgatcggcacgcgtatactggcataatcaatttatcattttgtcggcccggtaagcgtagcgccgccgggcaataaaattcaaagatattaaggaagcatgttatggcactttggggtgggcgttttactcaggcagcggatcagcggttcaaacagttcaacgactctttgcgctttgactatcgcctggcggagcaggatatcgttggctctgttgcctggtccaaagcgctggtgacggtgggcgtactgtccgccgatgagcagctacagctggaagaggcgctgaacgttctgctggaagacgtgcgggctaaccctcagcagatccttgaaagcgatgcggaagatattcatagctgggtggaaggtaagctgatcgacaaggtcggccagctgggcaaaaagctgcacaccgggcgtagccgtaatgaccaggtggcgaccgacctgaagctgtggtgcaaagacaccgtgatggaactgctgtcggcgaatcgtcagctacaaagcgcgctggttgagacggcggagaataatcaggacgccgttatgccgggctatacccacctgcagcgcgcgcagccggtgacgtttgcccactggtgtctggcctatgtcgaaatgctggcgcgtgatgaaagccgcctgcaggatgcgcttaaacgtctggacgtcagcccgctgggctgcggagcgctggcgggtaccgcctatgaaatcgatcgtgaacagcttgccggctggctgggcttcgcatcggcgacccgcaatagcctggacagcgtgtccgatcgcgatcacgtactggaactgctgtccgatgcctcaatcggtatggtccacctgtcgcgttttgctgaagatctgatcttcttcaataccggcgaagcgggctttgttgagctttctgaccgcgtgacttctggctcatccctgatgccgcagaagaaaaatccggatgcgctggagctgatccgcggtaaatgcggccgcgtgcagggtgcgctgaccggcatgatgatgaccctcaaagggctaccgctggcctacaacaaagatatgcaggaagataaagaaggcctgtttgacgcgcttgatacctggctcgactgcctgcatatggcggcactggtgctcgacggtattcaggtaaaacgcccgcgttgtgaagaagccgcgcagcagggttacgccaatgccaccgaactggcggattacctggttgccaaaggcgtaccgttccgtgaagcgcaccatattgtcggtgaagcggtagtggaagccattgcccagggcaagccgctggaggatctgcctctggccgatttgcagaaatttagccccgtgattgcggatgacgtctatccgattctggcgctgcagtcgtgtctggataagcgtgcggctaaaggtggcgtttctcctcagcaggtggctcaggcgattgccgacgctaaacagcgtctggtgtgatccgcctgcggggctgcttttaaggcggcaaataaacgaagctcgggtaactccgggcttttttatgcaaaaaaaagcggacacaaggtccgcaaaagttcacgttggctttagttatccgggtagagaggtgatgaggaagctcaatgattttctgaagttttcctcatttatgggtttattattgaacagaaaccttgatagggataatcgttcgttgctattctatctatcgccatggactatcgtggcgatggaggatgaataatgaatattcgcgatcttgaatatctggtagcgctagccgaacaccgccacttccgccgtgcggcggattcttgccacgtcagccaaccgacgctcagcgggcaaatccgtaagctggaggatgaactcggcgtgatgttgctggagcgcaccagccgtaaggttctgttcacccaggcagggctgctgctggtggatcaggcgcgtaccgtgctacgagaagtcaaagtgcttaaggaaatggcgagccagcagggagagaccatgtccgggccgctgcatattggactgatcccgacgattggcccttatctgttgccgttgattatcccgatgctgcaccagacctttcccaagctggaaatgtatctgcatgaagcacaaacccatcagcttttagcgcagcttgatagcggtaagctcgactgcgcgattctggcgctggtcaaagagagcgaagcgtttattgaggtgccgctgtttgatgagcccatgatgctggctatctacgaagatcacccgtgggcgaaccgcgagtgcgtgccgatgtcggacctggccggtgaaaagctgctgatgctggaagatgggcactgcctgcgcgatcaggcgatgggcttttgctttgaagcgggcgccgatgaagatacccatttccgggcgacgagcctcgaaacgctgcgtaacatggtggctgccggtagcggcatcacgctgttgccagccctggccgtgccgcaggagagaaagcgcgatggcgtggtctatgtgccctgcatcaagccggagccgagacgtaccgtggggctggtttatcgtccgggttcgccgctgcgtagccgctatgaacatctggcggaggccatccgcggtaagatggatggccatttcgacgccgcgttaaaacaggcggtttaagccatttaacgccgcgacccgataggcttccgccatcgtcggatagttaaaggtggtgttaacgaagtactcaatggtgttaccaccgcctttctgctccattatcgcctggccgatgtgaataatttcggccgcgcgctcgccaaagcagtgaatcccgaggatctctttcgtttcgcgatgaaagaggatcttcagcgtaccgacgctcataccgacgatctgcgcccgggccagatgtttgaactgcgcgcgacccacctcgtaaggcaccttcattgccgtcagctgctgctcggttttaccgacggagctgatttccggaatggtgtaaatcccggtagggatatcctcaatcaggtgcgccgatgcctcgccttttaccagcgcctgggcagcgatgcggccctggtcgtaggcggcggaggccaggcttggatagccaatcacatcgccgacggcataaatatgcggcagggcggtttgatacatgctgttgaccttcagctggccgcggctgtcggtttgcagaccgatattttccagcgccagtgagtcggtgttcccggtgcggccgttagcgtacagcaggcagtccgctttgagctttttgccggatttcagatgcatgatgacgccgtcatcaacgccctcaatcttttcgtactcttcattgtggcgaatgaccacgccgctgttccagaagtgataggagagcgagtcggacatctcctgatcgagaaacgccagcagacgatcgcgggtgttgatcagatccactttgacctccattccccggaagatcgacgcatattcgcagccgatcaccccggcaccgtagatgatcacatggcgcggttcgtgatgcaggctgagaatcgagtcgctgtcataaatgcgcggatgatggaagtcgacgtctgccggatggtacgggcgtgaaccgcaggcaatcacgaacttttccgccgtcaccgtttccacggtaccgtcgtggcactccagcgcgatagtgtgttcatcaacaaaatgggcattgccctgcaggatttcgcagtggttacgctcatagaaaccctgacgcatatgggtttgctggttaatgacgctgtcggcatggttcaggatgtcggcgaaggaagaacgaagaagacgggaatggtcgctgtagaggggattttggttaaactcgataatacggctgacggcatggcggagggcttttgacgggatggtaccccagtgggtacaaccgccgccgacgttatggtagcgctcaatgacggcaacgcgtgctccctgtttcaccagccccatggcggcaccttctccgccaggaccggaaccaatcacaattgcatcataatcccaagagtgtgacatggcattactcacctgttttatacataaaataaacacgatgataacattcgccgcgctttaacccaattatcgttgtgcttttttgcggcataaaagcagaaacagctcgtaaacaatcattcacaatccagtgtaaaccgattagttctaatctctggtatagtgccggaagggcttatggaaggattcagacaacgtgatgggcgtaagagcgcaacaaaaagaaaaaacccggcgttcgctggtggaagcggcattcagtcagctgagtgctgagcgcagttttgccagcttgagcctgcgcgaagtggcgcgggaagcggggatcgccccgacgtccttctatcgtcattttcgcgatgtcgatgagctgggtctgaccatggtggatgaaagcgggctcatgctgcgccagctgatgcgccaggcgcgccagcgtatcgctaaaggcggcagcgtcattcgtacctctgtttccacctttatggaattcattggcaacaacccgaacgccttccgcctgctgctgcgggaacgctccggtacctccgcggcgtttcgtgccgccgtggcgcgtgaaattcagcattttatcgcggaacttgccgactatttagaaatcgaaaaccatatgccgcgcgcctttaccgaagcgcaggctgaagctatggtcaccatcgtatttagcgctggcgccgaggctctcgatgtgggcccggagcagcgtcgacagctggaagaacgcctggtgctgcagctcagaatgatctcgaaaggcgcgtattactggtatcgccgtgaacaagaaaaaatatcaaatcattccgaataacgtgaaggacgagcaatgaaacactcagtacaagatagaggtacgctgctgctggcgctgatcgcaggtttatccattaatggtaccttcgccgcgctgttcagctccattgtccctttttccatcttccccattttgtcgttggtgctgacggtttactgcctgcatcagcgctatcagaatcgtagtatgcccgtgggtttgccggggctcgccgccgcctgttttattctcggcgtgctggtttacagtaccgtcgtgcgcgcggaatacccggacatcggatctaacttcttcccggcggttctgtcggtgattatggtgttctggattggctacaggttacgcaaccgcaagaacgcggtcgctgaataatctctcacccggcagcagcgctgttgccgggttttctcgcgcagctttacttcttcgttagcagcacgccgcattccatatgatgggtataggggaactggtcgaatagcgccaggcgcgcgatctcgtgggtctcactgagcgtttccaggttctggcatagggtctccggattgcaggagatatagagaatacgcggatacgcctgcaccattttctccgtttcgctatccagcccgctgcgcggcggatcgacgaaaatcgtctcgcactgatagctcttcaggtcgattccctgcaggcggttaaactcccgcacgccgttcatcgcctgggtaaactcttccgccgacatgcggataatctgcacgttatcaatgtggttcgctgcaatattgtattgcgccgccgcgacggacggtttggcgatttccgttgccagcacgcgttcgaaattacgcgccagcgccagcgaaaagttgccgttgccgcagtacagctcaagcaggtcgccggttgcgcctttagtggcgtcgatagcccactccagcatctgaatgttcatcgccgcatttggctgggtgaagctattctcaacctgacgatagatcatttcacgcccgccaaccggcaagcgttcatcgatatagtcttgatccagctcgattttagttttcgtggcgcggccaatcaggtgcacattcagattttgcgcccgcagcgcatcgcgcaggcgcgccgcctgctgacgccattcatcgtcgagctttttatgatacagcagcgatatcacggcctggttgctcagggtggtgagataatccacctgaaacagtttgtggcgcagtaccgggttatcgcgtacgccctcaatcaccgcggccatcagctgattaatcagctcgctggcggccgggaaagtctcgacgcggatccgggatttggtctgctggtcgaacataatgtggtacagatcgtcgccatcgtgccacaggcgaaactctgcgcgcatgcggtagtggctgaccggcgaacgaaacacttccggaaccggggcgctaaaaggcgccatcattttctgcaaacggacgactttttctgccagctgcgcttcatattgttcggtaggaaggtgttcgggggtcatgatgcatcctgaataaaataagtacgcggggattgtagggaaagcgccggggatgtccagccctgatgatataaggaaatataacggtagaagtctggacatctatatgtttctgattatagcatcgtgctaccggtcctatgagttaatagggaatccagtgtaaatctggagctgacgcgcagcggtaaggaaaagtgggatgagcgcattatgcagacactgcggctatttagcgggaagtcctcgtccattaaacactccaagcccgaagacctgccggaatacgtcgcatttggtttctatcatcgcgtgctactgatagagccggcggcatcctttgtttattacggatgctttaaaaatgattaaaaaagcttcgctgatgacggcgctctccgtcacggcattttccggctgggcgcaggacagcaattcagatacgttagtggtcacagcaaaccgttttcaacagccggtcaatacggttcttgcgccgaccgatgtggttacccgggaagatatcgatcgctggcaggcgaaagatttaaacgatgtgatgcgccgattgcctggcgtggacgtcgcacaaaatggtggcatgggtcaatcctcctctctttttatccgtggtactgaagccaaacaagttctggtgctggttgacggcgttcccatggcccgaccgggtattacaaataaccccgatctgaaccagatccctttgtcgctggtgcagcgcgtcgaatatatccgcggcccgcgttcagcgatttatggttccggggcaatgggcggcgtgattaacgtcattacgcattccgataaagaacaatccaaaattaccgctggggtaggatcgaaaggctaccaacaatatgacggtaccctgcgccatcgctttggcgatatggtggcgacggttgcgggttcttatgagggtaataaaggctttaacgttcagcccgattcaacctgggatcacgacggcgatcgcgacggttttcgtaataaaacgttttggggcagcctcgagcataaatttaacgagaatgttgacggtttcttccgcggacacagctacaccaacaactctgattacgatctgggaagcccgccgtatagcccggcctacagcgccgatgaaagccagctctataaccagagctgggatgcggggctgaactttaattccggaatttattcctcccagctcatcgccagctatcagaagataaaggactacaactacagcagtatttatggccgttataatgatgggacgacgctcgacaggatgacgcagcgtaacctgcaatggggcaataacgttattgtcggtcatggctctgtcagcgcaggggtggactggcagcagcagcggttaacttcatcagatacggcgatgtcggatacctacaaacgtgacaatacgggactgtacctgacgggccagcagcaagttggcgacgtgaccctcgaagcgtccggacgtgaagaccacgatgagcagtttggctggcacggtacctggcagactaccgcaggctgggagtttgtcgaaaattatcgcctgactctcggctacggtaccggcttcctcgcgccttctttagggcaacagtttggctccacccgatttggtatcaacgcgaatcctaatctgaaacctgaagagtcgaaacagtgggaagctgggctggaagggctcaccggtgccgtggactggcgcttgtccgcgtaccattacaaaattactaacctgattacctattattccgatcctgttacctatgacggggaatacgacaatatcaatgccgcgacgattaaaggcgtggaatggacgggaagtatcgataccggtattttcagccatcgcgtaacgttgcagtatgtcgatccgcgtaacgatgataacggtgaagtgctggcccgacgttctaaacgacaggcaaagtatcagctggattggtccatgtttgatgtcgatatggatgtgtcctggcagtattatgggaagcgttacgataacaacacctcccagtacaacaatacgcaaagaattttgccgagctacagcacggtagacgtttctgcatcgtatccgatcaccgatcgcctgacagttcgtggtaaaatagctaacctgttcgataaagattacgagacagcttatggctaccaaactgcaggacgagaatactacttgtctggcagctacaccttctgatccacgtcccaccgtgctggtgtttgattccggcgtcggtgggctgtcggtttacaatgagattcggcagcttctgccgaatctgcattatatctacgctttcgacaacgttgctttcccctacggcgagaagagtgaagagtttattgttgaacgcgtcctggagattgtgactgcggttcagcagcgttaccctctggcgctggccgttattgcctgtaacaccgcaagtaccgtttccctccccgccttacgcgataaattcgcctttccggttgtcggcgtcgttccggcgataaaaccggcggcccgcttaacggcgaatggcgttgttggcctgctggcgacgcgcggaacggtaaaacgcccttatacgcgcgaactgatctcccgttttgcgaatgaatgcaaaatcgaaatgctggggtcggcagagctggtagaactggcagaggccaaactgcacggtgagccggtcccgctggatgaactgcggcgtatcctgcgtccctggctacgaatgcaggaaccgcctgatacggttgtgctgggatgtacgcatttccctctaatacaagaagagctgcagcaggttctgccggaagggacgagaatgatcgactccggagctgcgattgcgcgtcgcaccgcctggctattagagcacgaagcgcctgacgcaaaatcgagtgatgccaatattgcgtactgtatggcgctgacgcctgaaactgagcagcttttgagcgttttgcggcgctatggcttcgagtcgctggaaaaactggcgctttcatagcattttgcacaaaaaagagacggttgaaagattttttgaagacagggcttgtcaacgtctcagaactccctataatgcgcctccactgacacggaacaacggcttacagcccgccgggtcagcgggattcagcgatgaataccggcagagaaaagcgaaaataatcgcttgactctgaatgaggaaaacgtattatacgggacctcgcgacagagcgctgaagcgcgtcgcaactgctctttaacaatttatcagacaatctgtgtgggcactcaaagtgacatggattcttaatgtcttcggacaataaatgaataccaagtctctgagtgaacacgtaattcattacgaagtttaattcacgagcatcaaacttaaattgaagagtttgatcatggctcagattgaacgctggcggcaggcctaacacatgcaagtcgaacggtagcacagagagcttgctctcgggtgacgagtggcggacgggtgagtaatgtctgggaaactgcctgatggagggggataactactggaaacggtagctaataccgcataacgtcgcaagaccaaagagggggaccttcgggcctcttgccatcagatgtgcccagatgggattagctagtaggtggggtaacggctcacctaggcgacgatccctagctggtctgagaggatgaccagccacactggaactgagacacggtccagactcctacgggaggcagcagtggggaatattgcacaatgggcgcaagcctgatgcagccatgccgcgtgtatgaagaaggccttcgggttgtaaagtactttcagcggggaggaaggcgataaggttaataaccttgtcgattgacgttacccgcagaagaagcaccggctaactccgtgccagcagccgcggtaatacggagggtgcaagcgttaatcggaattactgggcgtaaagcgcacgcaggcggtctgtcaagtcggatgtgaaatccccgggctcaacctgggaactgcattcgaaactggcaggctggagtcttgtagaggggggtagaattccaggtgtagcggtgaaatgcgtagagatctggaggaataccggtggcgaaggcggccccctggacaaagactgacgctcaggtgcgaaagcgtggggagcaaacaggattagataccctggtagtccacgctgtaaacgatgtcgacttggaggttgttcccttgaggagtggcttccggagctaacgcgttaagtcgaccgcctggggagtacggccgcaaggttaaaactcaaatgaattgacgggggcccgcacaagcggtggagcatgtggtttaattcgatgcaacgcgaagaaccttacctactcttgacatccagagaacttagcagagatgctttggtgccttcgggaactctgagacaggtgctgcatggctgtcgtcagctcgtgttgtgaaatgttgggttaagtcccgcaacgagcgcaacccttatcctttgttgccagcggtccggccgggaactcaaaggagactgccagtgataaactggaggaaggtggggatgacgtcaagtcatcatggcccttacgagtagggctacacacgtgctacaatggcatatacaaagagaagcgacctcgcgagagcaagcggacctcataaagtatgtcgtagtccggattggagtctgcaactcgactccatgaagtcggaatcgctagtaatcgtggatcagaatgccacggtgaatacgttcccgggccttgtacacaccgcccgtcacaccatgggagtgggttgcaaaagaagtaggtagcttaaccttcgggagggcgcttaccactttgtgattcatgactggggtgaagtcgtaacaaggtaaccgtaggggaacctgcggttggatcacctccttaccttaaagaacctgcctttgtagtgctcacacagattgtctgatgaaaatgtagcagtaaaaaaatctctgcaggcttgtagctcaggtggttagagcgcacccctgataagggtgaggtcggtggttcaagtccactcaggcctaccaaatttctgctgatgctgcgttgcggcgacactcacatactttaagtatgcttcgtgtcaccacgccttgcctcaacagaaattaaggttgatgagattaactacgatggggctatagctcagctgggagagcgcctgctttgcacgcaggaggtctgcggttcgatcccgcatagctccaccatctttactgcacaacacaagaaaacttcagagtgtacctgaaaaggttcactgcgaagttttgctctttaaaaatctggatcaagctgaaaattgaaacgacacacagttaatgtgtgttcgagtctctcaaattttcgcgacacgacgatgttttacgaaacatcttcgggttgtgaggttaagcgactaagcgtacacggtggatgccctggcagtcagaggcgatgaaggacgtgctaatctgcgaaaagcgtcggtaaggtgatatgaaccgttacagccggcgatgtccgaatggggaaacccagtgcaattcgttgcactatcgtttgatgaatacatagtcaaacgaggcgaaccgggggaactgaaacatctaagtaccccgaggaaaagaaatcaaccgagattcccccagtagcggcgagcgaacggggagcagcccggagtctgaatcagcttgtgtgttagtggaagcgtctggaaagtcgcagggtacagggtgatactcccgtacactaaagcacacaggttgtgaactcgaagagtagggcgggacacgtggtatcctgtctgaatatggggggaccatcctccaaggctaaatactcctgactgaccgatagtgaaccagtaccgtgagggaaaggcgaaaagaaccccggcgaggggagtgaaaaagaacctgaaaccgtgtacgtacaagcagtaggagcccactggttgggtgactgcgtaccttttgtataatgggtcagcgacttatattctgtagcaaggttaaccgtataggggagccgcagggaaaccgagtcttaactgggcgttaagttgcagggtatagacccgaaacccggtgatctagccatgggcaggttgaaggttgggtaacactaactggaggaccgaaccgactaatgttgaaaaattagcggatgacttgtggctgggggtgaaaggccaatcaaaccgggagatagctggttctccccgaaagctatttaggtagcgcctcgtgaattcatcttcgggggtagagcactgtttcggctagggggtcatcccgacttaccaacccgatgcaaactacgaataccgaagaatgttatcacgggagacacacggcgggtgctaacgtccgtcgtgaagagggaaacaacccagaccgccagctaaggtcccaaagtcatggttaagtgggaaacgatgtgggaaggcccagacagccaggatgttggcttagaagcagccatcatttaaagaaagcgtaatagctcactggtcgagtcggcctgcgcggaagatgtaacggggctaaaccatgcaccgaagctgcggcagcgacactatgtgttgttgggtaggggagcgttctgtaagccgttgaaggtggcctgtgagggttgctggaggtatcagaagtgcgaatgctgacataagtaacgataatgcgggtgaaaaacccgcacgccggaagaccaagggttcctgtccaacgttaatcggggcagggtgagtcgacccctaaggcgaggccgaaaggcgtagtcgatgggaaacaggttaatattcctgtactcggtgttactgcgaaggggggacggagaaggctatgttggccgggcgacggttgtcccggtttaagcatgtaggcggatgttccaggtaaatccggagcgtcactaacgctgaggtgtgatgacgaggcactacggtgctgaagtgacaaatgccctgcttccaggaaaagcctctaagcatcaggtaacatcaaatcgtaccccaaaccgacacaggtggtcaggtagagaataccaaggcgcttgagagaactcgggtgaaggaactaggcaaaatggtgccgtaacttcgggagaaggcacgctgatggtaagtgaagtgacttgctcatgaagctgaaatcagtcgaagataccagctggctgcaactgtttattaaaaacacagcactgtgcaaacacgaaagtggacgtatacggtgtgacgcctgcccggtgccggaaggttaattgatggggttatcctcgcggagaagctcttgatcgaagccccggtaaacggcggccgtaactataacggtcctaaggtagcgaaattccttgtcgggtaagttccgacctgcacgaatggcgtaatgatggccaggctgtctccacccgagactcagtgaaattgaactcgctgtgaagatgcagtgtacccgcggcaagacggaaagaccccgtgaacctttactatagcttgacactgaacactggtccttgatgtgtaggataggtgggaggctttgaagtgtggacgccagtctgcatggagccatccttgaaataccaccctttaatggctggtgttctaacgtgggcccctgatcggggttgcggacagtgtctggtgggtagtttgactggggcggtctcctcctaaagagtaacggaggagcacgaaggtcagctaatcctggtcggacatcaggaggttagtgcaatggcataagctggcttgactgcgagcgtgacggcgcgagcaggtgcgaaagcaggtcatagtgatccggtggttctgaatggaagggccatcgctcaacggataaaaggtactccggggataacaggctgataccgcccaagagttcatatcgacggcggtgtttggcacctcgatgtcggctcatcacatcctggggctgaagtaggtcccaagggtatggctgttcgccatttaaagtggtacgcgagctgggtttagaacgtcgtgagacagttcggtccctatctgccgtgggcgctggagaattgaggggggctgctcctagtacgagaggaccggagtggacgcatcactggtgttcgggttgtcatgccaatggcattgcccggtagctaaatgcggaagagataagtgctgaaagcatctaagcacgaaacttgccccgagatgagttctccctgaccctttaagggtcctgaaggaacgttgaagacgacgacgttgataggccgggtgtgtaagcgcagcgatgcgttgagctaaccggtactaatgaaccgtgaggcttaaccttacaacgccgaagatgttttggcgatttgagaagacaacaatttcagcttagattcagagttgagtacgcaataaaagatggcgtactgagcacaaagaatttgcctggcggcactagcgcggtggtcccacctgaccccatgccgaactcagaagtgaaacgccgtagcgccgatggtagtgtggggtctccccatgtgagagtagggaactgccaggcatcaaattaagtagtaagccggtgcataaatccggtggttacagaagtattcggtggagcggtagttcagtcggttagaatacctgcctgtcacgcagggggtcgcgggttcgagtcccgtccgttccgccacttattaaaaaattaagcctgctgattaagcaggcttaatgataagaaactttaggggcgtagctcagttggtagagcaccggtctccaaaaccgggtgtcgcgagttcgagtctctccgcccctgccatatataatcctttgctcaggcaaaggattttttttgctttcaatttccccccaatcgtcctccatccctggaggagtgcgtttatcccaatatattgtgcttcaggatctcccgaatctgcgcttgtttatcgctgttctgtagccaaatcgcatagagaggccttgaaagagtcgcactgtcggtaaccgtatgcagattatttttcccctgtgcccagagcacgggcagccatgtacagcccttaagcgcgctgagctgttggtaagctaactcggcagaactggtggtcagcagaggaatatcatcatttccgatcaatcccgcttcgttttgttggaaatcgggcccccattccaggcgtaaataattcaattcatttgtgtatttagccggagaggcacaataaagcgccagggtaaaattacccagcaactggctgcttagttcatccatcttcggcgattctgtcgtgatcaagagatcaagctgacgttcgtgcagctgtttgaccagcgattgccgctgcgcaatccgcgcctcaaactgtaggttatagggctctgtatagagctttcccagccatccattaagcaggcattcccacagagaagcgctggcaccgatcgaaaattcattatggcgggaagcattcgcgacctccttgcgcgcagcttgccaggtattcatcagggtttcggcgtagggtagcagtttctctccggctgaggtcagacggatattattacgatgacgggtaaaaagatttacccccagctggttctccagctgacgaatacgaaagctaactgctgactgcgtcagataaagcgcctctgcggctcggccaaagtggcgagttctgctcacctcaaggaaagtcttgagcaattccgtatccacactcttctccgcaaaattatttgtcgtgatgatttaaatgttttgtttgacgctctgtcaagcgtaactaatactccgcgccataattagctcggccaaagaatcaggagcgtgtaggatggcggaaagctttacgacaactaatcgttttttcgacaataaaaattatccgcgcgggttttcccgtcatggagatttcaccatcaaagaggcgcaactgctggaacgtcatggttatgcctttaatgaactcgaactaggtaaacgcgagcctgtcaccgacgatgaaaaacagtttgtttcggtatgccgtggtgaacgtgagcccgcaacggaagcagaacgcgtctggattaagtacatggcgcgcattaagcgtccgaagcgtttccataccctgtccggcggcaagccgcaggtggaaggtacggaagattacacagaaagcgatgattaagaaaaagggcgtaagccctttttttacgccatcattttttgtagatggctcaacattctgtctattgcccgatagccgagagcctcctgcaaatgatggcgttcgatgcgttcgacagcctcaatatcggcaatagttcgggacactttaatcaggcgctgccaggcgcggattgaaagcccgagctgtattagcgtctgctccagccagacagcatcatctttatgaagccggcagcagattttcatctcatcatttcccagatgcgcgttaagttttttctgccgcgatagctgcctttcgcgtgcggccagaacacgttggcgtacgcaggcgctactttcctcttcgtttgttccctggctgagcacccccggcggcggaagtgggatctccagggagagatcgaatcggtcaagaaacgggccggataaacgacccaggtagcgtagcgtctgttccggtgaagcgcgattatgctggccctgatagtgtcctgtcgggctgggattcatcgctgcaataagctggaaacgggctggataatcgattttggcgcgcgtgcgtgagatatggataacccctgactcaatgggttcgcgtaacgcatccagcaccctgcgttcgaattcaggcagctcatccaggaacaggactccgttatgggcaagggagatctctcccggtgccggaattgagcctccgcccaccatagccgccagggaggcgctatgatgcggggcacgaaagggcctgcggcgccaatttttcatgacatgcctggaatcgaccaggctaagtattgccgcgctttccagcgcttcctgattactcagcggcggcagtagtcccggtaatcgactggcgagcatcgtttttcctgtgccgggcgggcctatcatcagcaggttgtgaccacctgcagcgatgatttccagcgctcgtttcccctgccgttggccaataacatcacgcagatcaaccgatgtttcatccgaatattccccttctggaagggggttagccagggcatgtcgaccttcgagaaaagcgcagacttcctggagatcggtggcgataaggcagtcactgccgccgattaaccccacctctggagaattctcattagagataacaatcttccgccccgcttttatggcctccatggcgctggatatggccccaggaacgccacgcagagcgcctgtaagcgccagctcgccgacaaactcatattgatttagcctaggggcctttagctgctctgaggccaccagaagcgcgagagcgataggtaaatcatatcttcccccttcttttggcagatcggccggggccagattgatggtgatttttttcgccggataagcgtagccgctgttgataatcgcactacgtacccggtcacgcgcttctctaaccgttgtttcaggcagtcctaccattgtcaggcctgggagcccgttgctgatatgaacttcaaccgtgataagcggggcaccgatcccgagagcggcgcgggtgtaaacaatggcgagtgacataacacctcctgagaaccaggattatgtcggcgatttgctgttgagtaattcggcaatattaaattctgcatgcttgctcccagccaatttcccggcaatttccgctttgcactgatgttggatgccggctcgtaaaatgctgtcatcaggcaacaagatgaaaaagtgctgtggagcacgccacaaattgaaatattttcatttcatatttttcccattaaaaacaattgttttttcttaaatggttagcaaggtaagtaatgaggtcataaaaaatcttgtgtttaacacgaagtctgtggtacctctttaggtattccttcgaacatgaagccagaaagaacataaaatgacagcccttctacgagtgattagcctggtcgtgattagcgtggtggtgattattatcccaccgtgcggggctgcacttggacgaggaaaggcttaaaaaacaagccttaacgaactaagacccccgcaccgaaaggtccgggggtttttttataacttaaaaacagaaaagaggagcagacgatggctggtagcataaaattctgtttctctcgatctacgacggggaagtaactatgaatggggcgcggtgggtagtacatgctttgcgagcacagggagtcgataccgtttttggctatccgggtggagcaattatgccggtttacgatgcattgtatgacggcggcgtggaacacctactgtgccggcatgaacagggcgcggctatggcggctatcggctatgccagggctaccggcaaaaccggggtgtgtatcgccacttcggggcctggcgcaaccaacctgatcaccggcctcgccgacgcgctgcttgattccgttcccgttgttgctatcaccggccaggttgctgccccgttcattggtactgatgcattccaggaagtggatgttctcggattatcgctggcatgcactaagcatagttttctggtgcagtcgctggaagagctgccgcgtgtcattgctgaagctttccacgtggcaaactccgggcgtcccggtcccgtgctggtcgatatcccaaaagacatccagctggctcagggcgatctcgatccgcatttttccatggtagccgacgacgttgattttccatatgcggatatcgaatacgctttgcagatgctggctcagtcgcagaagccgatgttatacgttggtggcggcgtggggatggcgcaggcggtaccggcgctgcgcgaatttcttgccgttacgcaaatgcccgtgacgtccaccctgaaagggctgggagcggtagcggcggattatccctactatctgggcatgctggggatgcacggtactaaagcggccaaccttgcagtacaggaatgtgacctgctgatcgcggtaggcgcccgttttgacgatcgcgtcaccggcaagctgaatacgtttgccccgcacgccaaagtcatccatatggatatcgatccggctgaactgaacaagctccgtcaggcacatatcggcctgaccggtgatttgaatgtgatgctgcccgcgctgcagcagccgctgtctatcgacgcctggcgccaacgtaatgcgcagctgcgcgccgagcatgcctggcgctacgaccatccgggagacgctatctatgccccgctgctgctgaagcagctttccgatcgcaaacccgcagactgcgtcgtgacaaccgatgtgggccagcatcagatgtggtcagcgcagcatatgacctatacgcgcccggagaatttcatcacttccagcggattaggcactatgggtttcggcttgcccgcagcggtaggcgcgcaggtggcccgtccagacgatacggttatctgtatctccggtgacggctccttcatgatgaacgtgcaggagctgggcaccgtaaaacgcaagcagctgccgctgaagatagtcttactggacaaccagcgtttaggaatggttcgacaatggcaacagctgttttttcaggaacgttatagcgaaaccacccttaccgataaccccgatttccttactctggccagcgccttcggcatccctggtcaacacatcacccgtaaagaccaggttgaagcggcactcgacaccatgctttcgagccaggggccttacctgcttcatgtctcaatcgacgaacttgagaacgtctggccgttggtgccgcccggtgccagtaatgcagaaatgctggagaaattatcatgatgcaacatcaggtcgccttgcaggctcgctctaatccagaaacgttagaacgcgtgctgcgcgtcgtgcgccatcgcgggttccagatttgcgcgatgaatatggcaaccgccgccgatgcccggaatattaatattgaactgaccgttgccagccagcggcccgtcgaattactgtttagtcaattaagcaaactggtggacgtcgcctgcgtcgagatccagcaacctacatcacaacaaattcgcgcctgagcgcaaaggaagaataatgacgacgaaaaaagctgattacatttggttcaatggcgagatggttccgtggggagaggcgaaggttcacgtgatgtcccatgcgctgcactacgggacttccgtatttgaaggcatccgttgctacgactctcacaaggggccggtggtgttccgtcaccgtgaacatatgcagcgtctgcatgactcagccaaaatttatcgtttcccggtttctcaaagcgttgatgagctgatggaagcctgccgtgaagtcattcgtaaaaacaatctgaccagcgcctatattcgcccgttagtttttgtcggcgacgtgggcatgggcgtcaacccgcctccgggctatagcactgacgtgatcatcgcggcgttcccgtggggcgcctacctgggtgccgaagcgctggatcaggggatcgatgcgatggtttcttcctggaatcgcgcggcgccgaacaccattccgaccgcggccaaagccggcggtaactatctctcttcgctgctggtcggcagcgaagcgcgtcgtcatggctatcaggaaggtatcgcgctggatgtgaacggctacatctctgaaggcgccggtgaaaacctgtttgaagtgaaggatggcgtgctgtttactccgccgttcacctcttccgcgctgcctggcatcacccgcgacgctatcatcaagctggcgaaagatctcggcctggaagtccgcgagcaggtattgtcccgcgagtccctgtacctggccgacgaagtgtttatgtccggtactgccgcagagatcacgccggtacgcagcgttgatggtattcaggtgggcgaaggccgctgcggcccgatcaccaagcgcattcagcaagcattctttggcctcttcaccggtgaaaccgaggataaatggggctggttggatcaggttaataactaagtataaaaagatggggcggcacgcaacgccccatttcaccgaaactgggagtaactaaagcatgcctaagtaccgttccgccacaaccactcacggccgtaatatggcgggtgcccgcgcgctgtggcgcgccactggaatgaccgacgatgatttcggtaagccgattatcgccgtggtgaactctttcacccagttcgtgccgggccacgttcacctgcgcgatctcggcaaactggttgctgagcaaatcgaagccgctggcggcgtcgccaaagaattcaacaccattgcggtggatgatgggatcgcgatgggccacgggggtatgctttattcactgccatcccgcgaactgatcgccgactcggttgagtatatggttaacgcccactgtgctgatgcaatggtctgtatctccaactgcgacaaaatcaccccggggatgttaatggcgtctctgcgcctgaatattccggtcatttttgtttccggcggtccgatggaagccgggaaaactaaactgtccgatcaaatcattaaactcgacctcgttgacgcgatgattcagggcgctgacccgaaagtctccgacgatcagagtcatcaggttgagcgttccgcctgcccgacgtgcggctcttgttcgggaatgttcaccgcgaactccatgaactgcctgaccgaagcgctgggcctgtcgcagccgggcaacggctcgctgctagcgactcacgccgatcgtaaacagctgttcctcaatgcgggctcacgtatcgttgagctgactaaacgctattacgagcaggacgatgcctctgcgctgccgcgtaatatcgccaataaggcggcgtttgaaaacgccatgacgctggatatcgccatgggcggttccaccaataccgtactgcatctgctggcggcggcgcaggaagcggaaatcgacttcaccatgagcgatatcgataaactttcccgcaaagtgccgcagctgtgtaaggtcgcgccaagtacgcagaaatatcatatggaagacgtgcatcgcgcgggcggcgtattgggtattttaggtgaactggatcgtgccgggctgctgaaccgcgatgtgaaaaacgtgcttggtttgtccctgccgcagacgctggagcagtacgatatcaccgtcacgcaggatgaagcggttaagaagatgttccgcgctggccctgcgggtatccgcacaacgcaggctttctctcagaactgccgttgggacaccctggatgacgatcgcgcagaaggctgtatccgctcgctggaacatgcttacagcaaggacggcggtctggcggttctgtacggcaactttgccgagaacggctgtatcgtgaaaaccgccggcgttgacgacagcatcctcaaatttaccggcccggcgaaggtatacgaaagccaggacgcggctgtggatgcgatcctcggcggcaaggtggtcgccggtgacgtagtcgtcatccgctatgaagggccgaaaggcgggccggggatgcaggagatgctctacccgacgaccttcctgaaatcaatgggcctgggtaaagcctgtgcgctgattaccgacggacgcttctccggcggtacttcaggtctctctattggtcatgtttctccggaagcggccagcggtggcaatatcgcgatcattgaagatggcgacatgattgctatcgatatcccgaaccgcggtattcagctgcagctaagcgatgccgagattgcggcacgccgcgaagctcaggaagcgcgcggtgataaagcatggacgccgaaagatcgcgagcgtcaggtttcctttgcccttcgcgcctatgccagcctggcaaccagcgccgacaaaggcgcggtgcgcgataaatcgaaacttgggggttaatgatggccgagtctcaacccctgtccgccgcccccgagggggcggaatacctcagagcggtactgcgcgcgccggtatacgaagccgcgcagatcacgccgctgcaaaaaatggaaaagctctcgtcgcgcctcgataacgttgtgctggtgaagcgtgaagaccgtcagccggtgcacagctttaagctgcgcggagcctacgcgatgatggcgggcctgacggaagagcaaaaatcgcatggcgtgattaccgcttcggcgggtaatcatgcgcagggcgtggctttctcggcatctcgcctgggcgtgaaggcgctcatcgtcatgccaaccgccaccgcggatatcaaagttgatgcggtgcgcggcttcggcggtgaagtgctgctgcacggcgcgaatttcgatgaagccaaagccaaagccatcgagctggcgcagcagcaggggttcacctgggttccgcccttcgaccatccgatggtgattgccgggcaggggacgctggcgctggagctgctgcagcaggatgcccatatcgatcgcgtatttgtcccggtcggcggcggcggtctcgcggccggcgtggcggtgctgatcaaacagctgatgccgcagattaaagtcattgcggttgaggccgaggattctgcctgtctgaaagccgcgctggatgcgggtcatccggtcgatttaccccgcgttgggctttttgccgaaggcgtggcggtgaaacgcatcggcgatgagactttccgtctctgccaggagtatctcgacgacatcgttaccgtcgatagcgatgccatctgcgcggcgatgaaagacctgtttgaagatgtgcgtgcggtagcagaaccttccggggcgctggcgctggcggggatgaaaaaatatatcgctcagcataatattcgcggcgaacgcctggcgcacgtactttcgggcgcgaacgtcaacttccacggcctgcgctacgtttccgaacgctgcgagctgggggaacagcgcgaagcgctgctggcggtcaccattccggaagagaagggcagcttcctcaagttctgccagctgctgggcggccgttcggtgaccgagttcaactaccgcttcgcggatgcgaaaaatgcctgcatttttgtcggcgtgcgcctgagccgggggctggaagagcggaaagagatcctcaacctgctgcacgacggtggctacagcgtagtggatctctccgacgatgaaatggccaagctacacgtgcgctacatggtcggcgggcgtccgtctcagccgctgcaggagcgtttgttcagcttcgagtttccggaatcgcccggcgcgctgctgaagttcctgcatacgctgggcacccactggaacatctctctgttccactatcgcagtcacggtaccgattacggccgcgtgctggcggcattcgaactgggcgatcacgagcctgacttcgaaacccgcttgcatgagctgggctacgattgccatgatgagagcaataatccagcgttcaggttcttcctcgccggttaagaagcgctgtgcttgtcaggcctgtggtcgggctgcaggcctgagcaggcccggcattagtggccaggcagcaaattccagaacgcattaatcagcggctcatgcagccgcttttttggcgcgcagacgcccagctcaaacggggttttctcgtcgctacgctccagaatcatcacgcgattgcgcactggctcagggctgttttccagcaccacctccggcagcagcgcgacgccgcagccgagcgccaccatggagaccatggcttcatgcccgcccaccgtggcgtaaattgacggattactgattttatggcggcgaaaccatagctcaatgcggcgacgcacgggcccctggtcggccataataaagggtaccgttgcccagtcaggcttctccactgagacctggttacgaaccggacaaggcagcgccggggcgatcagcaccaccgccagattctccagcatggaaaaagccaccgcgccgggcagcgtttccggtttcccggcaatcgccagatcggcctcacccgtcaccactttttccatcgcatcagcggcatcgccggtggtgagctttatttccaccgagggatgctcggcgcggaaacgatcgagaatcggcggcagatgactgtaggcggcggtcaccgaacagaagatatgcagttcgcccgacagcgacggaccttgctgatcgatagtgtggcgcagctgctgatactgcaacagcgtctgctgggcaaaggtgcggagctcttctcccgcttcggtaagcgttaccgtgcggttatcgcggacaaacagcggctgcccgaggtcttcttccaggcgctgaatttgtcgggaaagcgtggaggggctgacgtgcatcgcccgcgcgctgcggccaaaatggcggctttcagccagatgcaggaaggttttcagatcgcgtaaatccaccggcggcactccacgattttacattgcagaaattgcaacgtgacgttgtgaatatatcaatttccgcaataaatttcctgttgtaatgtgggtacattctcgctgaaacgcgaaccgaacaaaataagacacacaacatcacgaggtatcaccatggctaactactttaatacactgaacctgcgccagcagctggcgcagctgggcaaatgtcgctttatgggtcgcgacgaattcgccgatggcgcaagctaccttcagggtaaaaaagtggtcatcgtcggctgtggcgctcagggcctgaaccagggtctgaacatgcgcgactccggtctggatatctcctacgcgctgcgtaaagaagcgattgccgaaaagcgcgcatcatggcgcaaagcaaccgaaaacggcttcaaggtgggtacctacgaagagctgatcccgcaggccgatctggtggttaacctgacgccggacaaacagcactctgacgttgtacgttccgttcagccgctgatgaaagacggcgcggcgctgggctactctcacggcttcaatatcgtggaagttggcgagcagatccgtaaagatatcaccgtcgtgatggtggcgccgaagtgcccgggtaccgaagtacgtgaagagtacaaacgcggtttcggcgttccgaccctgatcgcggttcacccggaaaacgatccgaaaggcgaaggtatggccattgctaaagcctgggctgcggcgaccggcggccaccgtgcgggcgtgctggaatcgtccttcgttgccgaagtgaaatccgacctgatgggcgagcagaccatcctctgcggtatgctgcaggccggttctctgctgtgcttcgataagctggtggaagagggtaccgacccggcatacgccgaaaaactgattcagttcggctgggaaaccatcaccgaagcgctgaagcagggcggtatcactctgatgatggatcgcctgtctaacccggctaagctgcgtgcttacgcgctgtccgaacagctgaaagagattatggcgccgctgttccagaagcatatggatgacatcatctccggtgaattctcctccggcatgatggctgactgggccaacgacgataaaaaactgctgacctggcgtgaagagaccggcaaaaccgcgttcgaaactgcaccgcagtttgaaggtaaaattggcgagcaggagtacttcgataaaggcgttctgatgatcgcaatggtgaaagcgggcgttgagctggcgtttgaaaccatggtggattccggcatcatcgaagagtccgcttactacgaatcactgcacgagctgccgctgatcgccaacaccatcgctcgtaagcgtctgtacgaaatgaacgtggttatctccgataccgctgaatacggtaactacctgttctcttacgcttgcgtaccgctgctgaaagagttcatgaccaccctgcagaccggcgacctgggcaaagcgattgccgaaggcgcggtagacaacgctcagctgcgcgacgtgaacgaagctattcgcagccacgctatcgagcaggttggtaagaaactgcgcggctatatgaccgacatgaaacgcattgcggtagcgggctaattccccgtcgtctttcaacttgcagatgcgttggctgcgttcgtacaccccagtcacatagttatctatactcctggggctgtactcacttgccgccttcctgcaagctgaaatccttaggggaaagctgtgagataaaaaaccggtgcaaataagacaccggtttttttatttgcggtacagcaccttgatgatgtgataaccaaactgggtgtgcagcgggccggtcggctccagctccgggcaggagaagacgactttatcaaacgccggcaccatctggccctggcggaattcacctaaatcgccgccgcgtttgcctgacgggcagatcgagtgcttcttcgccagtttgccgaaatcggcgccgtttttaatttgctccagaagatccagtgccagctgctcttctttaaccagaatatgcagtgctgctgccgtttttgccatgatcgtaccttgagtgagtgggggataaaccagggcgcaatagtagcatgggctagcggcgatacagcaccttaatgatgtggtagccgaacttggttttgaccggtccatatggctttagcagcgggcagctgaagaccgctttatcgaacggcccgaccataacgccttgattaaactccccgagatcgccgccgttgcgtccggatgggcactttgaatagcgctttgccagatgatcgaagctcacgccacgttccagtttggcgaggatctcttgcgccagcttctcttcttttaccaggatatgcagggctgctgcgctctttgccattattttgctctcatgtctcaaagatatcccgttactttaccatccgctttggtcgcggacctatactcttcgccatcgcgggacaggtgtctcgcctgatagacggaagcgggagatgggcaacacttttcttcggcgttttccttctggccggggacagccgtcctgtccttatcgtcgtggagcgagataacatggatacaatgaaaaagcctgaattttcagtcggctggctttccgggctgagcgagattgtgcgcgatccgctgctctatgaattactgaaatattgtcctctggagatcatgcggcgctggcgcttcgaagacattccgcgcggtgattttatctgccgacagggggaagtgtgccagcgtttttcgctgattatcgccggtgaggtagacgttttctatgaggctgaagacgggcgccgctaccgccaggcccgctaccgtaaaggtgacatggtgggcgaactcgagatctttgagtcgcgtcattacatctgctcggtggtggcggtggaccatgtgcagctcctgagcctgtcgcaggaacatttctgccgctggctggcgctggataaccactttaaccagcggatgctgcgcttctttagccagcaatattatcagctatcgaaaaaggccagcagcgacaatctctactcgctgcatcagcgggtgtgtcaggcgctatggctgcgttatcaacaggatggcgcgaatgaaatcttgctggataagcagaatctcagtcaggagttcgcggcgacgacccgcagcattaaccgtattttgcatgacctgaaagcgctacagattattgataccgatggtgaacgaattgtgttgttagctcctgaaaaactgaagcaggaggctgatatcggataaccgcaagagtaaggaggcgggagaatgtcgctgcaaccccatatccagttaagcaaagagatgaccggcgcgcggtacgcgctgctgccgggcgacccgcagcgggtcgaccgcatcgtcaattttcttgataatccacagcggctcggtcagaaccgggagtttcgcgccgcgcgcggctggtatcagggcatcgagattttggtgctctccaccggcatcggcggaccctccacggcgatcgccattgaagaactgcgccagattggcgtaacaaccctgattcgtatcggcagctgcggcgcattgcaggataatcttgcgctcggcgatgtgattatcgctcacgctgcggtgatggatgatggtaccagccgaacctatgcgccggcgggctatccggcctgcgccgacccgctgctgacctgggaactggtggcgcaggcgcggcaaatgaacatccccgccgcgtgcgggctggtgcgcagccacgacagtttctataccgatcgtgaggcggaactggatgcgcagtggtcggcgcgaggcgttctgggcgcggatatggagagcgccgctctgatgactatcggcgcgctgcgcggcctacgtacggcatcattactcaacgtggttgttgcccacaacggttgcctggatagcagcatcaatgattatgtccagcaggaggcgctgtgccagcagggcgaagaacggcaaattaccctggcgctgcgcgccatttattccgctagccagcaaggaggtctgtgatggacttttttagcattaacaatgtgatggtcaacattcctctcggcgaaggcggctatgcgctatcgtggattgaggctatcggtaccgtattcggcctgctgtgcatctggtgcgccagccgggaaaaaatcatcaactatctgtttggcctgattaacgtcacgctgtttgcggcgatctttttccagatccagctctatgccagcctgctgctgcaggtctttttcttcgctgctaatatttacggctggtacgcgtggagccggcaaaacgaggcgcaggaggccgcgctcaaggtacgctggctttcccgtcagcaaacgctggcgctgggcggcgtctgcgcggtggcgattgtgctgatgacgctgtttatcgatccggtgttcgcgacgctcactcgtatcatgattgctctgctgcaaacgttcggtatgcaggtcgcgatgcccgacctccagcccgacgccttcccgttctgggattccaccatgctggtgttgtcgattgccgccatggtgctgatgacgcgtaaattcgtcgaaaattggctgctgtgggtggttatcgacgtgattagcgtggttatctacgcggtacagggcgtttacgccatgtcgcttgagtatgtcctgctgacggcgatcgcggtaatgggctcatacagctggatcaaaagcgcacagcgtaacggctatacgccgcttgccgcggccgcatcctgattgaccgatttccaggctgcctgaatgggcagcctgttgctctctgtgcccctctttctgctacaatccccaccccgttcgaagattgagcaaaagactcccatgcgtttaaatcctggccaacaacaagccgtcgaattcgttaccggaccgtgcctggtgctggcgggtgccggttccggtaagacccgcgtgattaccaataaaatcgcccacctgatccgcggctgcggctatcaggcgcgtcatatcgcggcggtcacctttaccaacaaggcggcgcgcgaaatgaaagagcgcgtcgggcaaacgctgggacgcaaagaggcgcgcggcctgatgatttccaccttccacacgctggggctggatatcatcaaacgcgaatacgccgcgttagggatgaaatcaaacttctcgctgttcgacgataccgaccaggtggcgctgttaaaagagctcaccgaagggctgatcgaagacgataaagtggtgcttcagcagctgatctcgacgatctccaactggaaaaacgatctgcaaacccctgcccaggccgccgctggggcgaaaggggagcgggatcggatctttgctcactgctacgggctgtacgacgcgcacatgaaagcctgcaacgtactcgactttgacgatctgatcctgctgccaacgctgctgctgcagcgcaacgaagaggtgcgggagcgctggcagaataagattcgctatctgctggtggatgaataccaggacaccaacaccagccagtacgagctggtgaaactgctggtgggacagcgggcgcgctttaccgtggtcggcgatgacgatcagtcgatctactcctggcgcggcgcgcggccgcagaacctggtcctgctaagccaggatttcccggcgctgcaggtgatcaagctggagcaaaactaccgttcttccgggcgcatcctgaaggcggctaacatcctgattgccaataacccacacgttttcgagaagcgtctgttttccgaactgggctatggcgtagagctgaaggtgctctctgccaataacgaagaccatgaggcggagcgcgttgccggtgaactgatcgcgcatcactttattaataaaaccgcctataaggactacgcgattctgtatcgcggcaaccatcagtcgcgggtttttgaaaagatgctgatgcagaaccgcatcccgtacaaaatttccggcggcacgtcgttcttttcccgcccggaaattaaagacctgctggcctatctgcgcgtgctgactaatcccgatgatgacagcgctttcatgcgcatcgttaatacgccaaagcgtgaaatcggttcggcgacgttgaaaaagctgggtgaatgggcgatggggcgcaataaaagcatgtttaccgccagcttcgatatgggcctgacccagaccctgaacgggcgcggctatgagtctttgacccgctttacccactggctgcgggagatccagcagctttcagagcgtgaaccgattgccgccgtccgcgatctgatccgcggcgtggattatgaatcctggctctatgagacctcgcccagcccgaaagccgccgaaatgcggatgaaaaacgtcaatacgctgttcacgtggatgaccgaaatgctcgaaggcagcgagatcgatgaaccgatgacgctcactcaggtcgttacccgctttaccctgcgcgatatgatggagcgcggcgagtcggatgaggagacggatcaggtgcagctgatgacgcttcacgcgtcaaaggggctggaattcccatatgtctacctggttggtatggaagaggggctgctgccgcaccagagcagcattgatgaagacaacgtcgatgaagagcgccgtcttgcctacgtaggtatcacccgcgcgcagaaagagctgacttttaccctgtgcaaagagcgccgtcagtacggcgagctggtgcgaccggagccgagccgttttctgctggaactgccgcaggacgacctgatttgggaacaggagcgcaaagtgatttcgccggaagagcgcatgcataaaggccaggcgaacgtcgccaacatccgggcgatgctggcgaaagcgcgtaaatagcggctagcggctgttttgctgttgaatctggaactgacgtagcgctttgcgaccgggtgcgccgtctgaaccgggttgactgatgacaatggccgccacttcattgcccagccgcgttgcctgctgcaaatccattccacaggcaagcccggcgatcgtaccggcacagtggctgtctcctgcggcaatcgtgtcgtggaccttcacgcggcaggccggaatatgctgcggtgctgcgtcaggttcaaccacccatgcgccatccttatcaaaccgacagatcgcccgaatatgccagtcgctggcgagccgtgaggcggcatcaagggtcgcgctatccaaatcgtataaacgcgcgcacagcacgctgagttcatcgcgattcagggtgagcagggggcgtttgcgcagcagcgcctggataaagtgaatatccaggtcgcacagacgcgggccaaaatcgacgaacagcgttttatcttccgtctgggcaaggatccactggcgcagcgcttcgctggccagttcgtatcccgagacgtaaataatcgcctccttcggcagcggtatttgcgctaatagttcatcagtccagtgctgttcgcagccctcaatggtgataaacgtccgctctttgctggcttcgacaagagccagacaccagccgttatcgtgggtgggatggcgcaagaggacgggcaagttttccagcgccattttttgcgcaacggcctgcccccaatcgccattgcctaccggtatggcgttaatgggaaacagttcgaggcgcgagagcgcgcgggcgacgttgaacgcgcagccgccaatctgccgtccgccgtcgcgggcggagacatcgctaccgctttgcggcagcgcatcgagatggagaataatgtcgccaaaagcggcgccgataaccacgatcggccgctgaggcgatagcaggtcagcgctgattgtcacggcaggccccctttctcgttccgaaggcgagatacagcgccaggctcagaataaaagagacgaataacccgaggctggagtccgcgaaaataccgaccgcgaaaggtccgtcgataaaaccggttttagagaccatcaatcctgccagcgcaccgacaatccagcagcccagcgcggtacggtttgcgccgctctccctgaataaatcagcttcaggatatccggcacggcggcgcagccgataaaaatcgaccataaagatggcggcccaggcggccagaaatacgccgcagaaaatcaaaaacgcgatgaacggcccgagaaaatctttcgagacaaacagcacgtagagggcaatccccagcaccagcacggcgtcgagggccacggcagaacgctgctgtagcttaatccccatgcttaacaggttaaggctggcggaatagaggctcaacacggcgatggtcacgaccccggcggtagccgcggccagataggggatagccatccacgaaggcagcagtttaccgatcgctgaaatggggttctcgctggaggccagatcggggatctgcgcggtaagcagtattccggtgagcatcagcaacagaagcgggagggcggcgccgctgaccacggcgagaaaaataggcttttccccggagtcagggcgctgatcgcggctatagtcggcgccggcgatagctcagctgatgccggtgcccgcggcaataatagacacggccggcagaaagccggtcagccagctgcctgaaggcagcgcgaggatggcctgccagtccgcggtgaagagtaaatagatcaccaccagcagcgtcatggcgccaaagatccgggtgatccatttttgcatcatcagcacggcgttttgcccgagcacgctgaccagtacggtcagcccgccaaacaagaaaagcgacagcgcggtggtggtcagactctcttcaaaacccatggcggcaaacagcgcgacgagggtgagcgtgccggtaatgatattgaccgcttcccagcccatcaaattcacccaacagaagctggtgggggcgatattaccgcgtttgccaaaaatgacgcgggagagggttagcgtcgtcgtacgaccaattttcccggcgatgctggtgatgccgaccagcgcaaaggaggcgacgcccgccacggcggcaagaatcgcctgccagaatgagaggccgaacgacacaatcaccgcgccgtaaacgacgccaagaatgccaatattcgcggcgcaccagacgaaaaacagctggaccggtttctgggtctggtggaccggggggaccagaccgatccctaattctgccattccgggatctgccgcctggatatttccatcgtatgaagctttgctgtccatagtgataccctctgtgaattatgcgaagcggtagcctgcaagccgctgtgcgtaaggcgcgaagtcgatgctgttggcctgcttaatccgttgtatatgttcttcaggaaaagcctctatgccatgaagcgcgccgcagatggcggtggccatcgcgccaatggtgtcggtgtcgccgcctaaattggctgccagcatagcgcatttcataggctgcgtttttgccagctcaaccagagcaatcgctgcggggacggactcgataatatccataccggcgccgatgtcctcataaatccgttcaatacccgtcagatggtcagtctccccggcgatcgtttccagcgccaggtggatacggtttcccagtagtggactaaaagtggactcataatggcgctgcgtctcattggcgagcgacgccagctccgttttgattaacggccattcggccccttcaatggcgcggccgatcgcccaggcaatgaccaccgcgccggcgatagcgatgtctgatttatgcgtcggcaggcaggatagccgcacttgctcaatgaaaaacgttctgtccccggtgggcagtagacagcccatcggcgccacgcgcattgccgcgccgttggttacgccgttggccgcgatctcctccagcggctgcccctgttcaagcgcgatcagggaagccttcgaggtcgggccaagaatatttttttcaaaggcctgacagcgtctggcccacagcagaatatgcctggcgatgaccagtggatcggtcacgccgttggtttcattcagggcatccatgagtgcgatgcactgatgggtatcatcggtgaactcagcggcgcgaaattcgcaggccgcaatattctctttcggtccggggaggaagcgctcaatccagccaaaatggttaataattcggcgcttaggccacagttcggaaggcatacccatcgcatcaccgatggcttgcccataaaggcagccgaggatgcggttttcggtggtataggtagggtgaatagcagacatcatcggctccctggaagaaatgaataaaagttatactaaaagtagatccagattaagtcaagttaaagtcctttgtggccatgctgtgatcgaagacgcattctgaaagaaaagtgagaagctaaaaaagggtggggagacgttatgagggggctattgattccagtatggatccactatgataaatccactgccactgaattccggaagactacgacattatgccgcaatcgctgcttgagtatataaaagggcgtctgaatgcagaggctcccgcgccgctttatattcaacttaaacaagctattgaagcggcaatgaccgagcggttgctgacgcacggcagcatcctgccttccgaacgcaaaatgtcgcagacgcttgagctatcgcgcgtgacggtcgtgaaggcgcttgatgcgctgctggaggccgggctggttattaaacgccacggaaaagggactgaggtgaatctgccggtaagctataaccttgccagcggcggattttctgcccagctacaaaattcaggcacggtgtccaaccgatggctggtgagggaaaagctggcggcggatgattttctggcccgtgagctggagatcgcggtcggcgatcgggtggcgaaaatcaaacgcgtccgtctggtcgatgccctcccggtgtctatcgaaaccatgtttatccccgagcgtttcttaccccgcccggatctacttgaaggttcgctgtacgcgcactgggcggaaaatgatatttatcccgatcttcaggattactcactgacggtgcatattccttcggcggaagagctgaatttgctcgacctgccgcaaggcgtgccattgatgaaaattacgctgaaaagccgcaatgctcagggagaggtgcttgagtacggaaccgcattctgcctgagcaattactttaattttgatttcagagtgaagctgcaataagcgctttggcatggccggtgtataaaacccgccatcgctttatgcgagagcggatcgtagccgactactgctcgttaagccgcagcggccagtgaacgtagctctgccactggcactcctgttcgaccatttcccggcccagcggatgattctccagccagccctgcggcagcgttaacgtcaaattttcatcttcggcagccagcgtaagcatcggcagcagatcgtcgcgtcggcggctggcaaacagaatcgccagacgcagcagacggcacatatgctccgcgactctcggaggcaccgcgttttgttgatgaatggatgaaaggtcgacggcgttggtttggtttaacagcagcgtcgccagcagcttcttttgtgcgggggtaaagccgggcaggtcaagattgcgcaccagccaggcggcgtgcaggggggcctgcttgtactccacgctcagaccaatttcatgcagctggcaggcactttgcagcaaatcgaagcatagtggctcaatttcccagctgttttccacctgatgaacgaaatgggcggccagttgggcaacgcgctgtgcctgttcggtatcaaccagaaaccggcgctgaatattgcgtaaggtacgactgcgaatatcctgatcgattgacaggtgcagcatgccgtagaccagaccttcacgcagcgcgccgccggcgagcgtcatacactgaatattcagctcgctgaagatggccataagaatcgccagcccgctgggaaagacgagcgcccgttcaagcgtcaggccttcgatctccagctcttccagacgaccgcactgaatcgcgcgctgtttgagctgctgtagcttggctaaggtgatgcgttcatccatcccttgcgccatcatgatttcctgtaacgcctgaaccgtaccggatgccccgacgcacactttccagccgtgatagcgcagcacatcggcgacgggacgcaaaacttcacgcgctgcggtttcggcctggtcaaagttctctttggtcaggctgcgatcggcaaagtagcgttccagccaggtcacgcagcccatggacaggctgaaaagcgaggtggtttgcgcgccggtaccggtaaccagttcggtgctggcgccgccaatatccacaaccagacgctgatctgcgccgcctgttgtatgcgcaacgccctgataaatgaggcgcgcttcctcttcaccgctgataacctgaaccgcacagccgaggatttcccgcgctttctccagaaactcaccggcgttaaccgccaggcgcagcgtcgctgtggcgaccacgcggatttgcgtcggggggatatcctgcaaacgctcggcaaacaggcgtaaacattgccagccgcgctccatggcttctgccgagagcgtattgtcgccgctgaggccagcggccagacggaccttgcgtttgatacgactcagggtctggatgcttccggcaacctcgcgtacaaccaacatatgaaagctattggagccaagatcgatagcggcatagagcgaggtggagctcatacacttcatccttcaagttgcctctgtgttggctgcgttctcttacccgaatcacttaccagcgtcagctcgccgcgattcgctttcctgcggccttgatgcaacttgaatgattttgtgtatggcatagtgctttaacctgaacgacgacgattacgtggcggaccgttacgacgcgggccgttgcccgggcgcgggcgcgtaagacgtagcggtctgggcagttcagtcatcagcgcgtccgaattgtatttgctgaccggaattgaatggccgatataggtttcaattgccggcagattcagcgcgtactcttcacaggccaggctgatggagtgaccgctggcgccagcgcggccggtacggccaatacggtgaacgtagtcttcgcaatcgtccggcaggtcgtagttaaagacgtgcgtaacggccggaatatgcagaccgcgggcggcaacgtcggttgcgaccagaatgtcgatatcgccgcgggtaaattcatcgagaatgcgcaggcgttttttctgcgcaacgtcgccggttaacagaccaacgcgatggccgtccgccgccaggtgaccccagatatcttcacaacgatgtttggtgttggcgaaaataatcgcgcgatccggccactcttcttccagcagcgtctgcagcaggcgcattttttcttcgttggaaggatagaacagctcttctttaatacggtggcccgttttctgctcaggctcaacttcgacgtactcggcgttgttcatttgttcgaacgccagttcacggacgcgataagaaagggtggcagagaacagcatgttcaggcgctgattcgctggcggcatacggcggaacagccagcggatatctttaataaagccgagatcgtacatgcgatcggcttcgtcaagcacgacaacctgaatggcgccgaggttaatatggttctgtttggcgtaatcgataaggcgaccggtggtaccgatcagaatatccacgccgctttccagcactttcagctgcttatcgtagccgtcgccgccgtaagccaggccgagtttcagaccggtagcctgcgccagcggttcggcgtcagcgtggatctgaaccgccagttcacgcgtcggcgccatgatcagcgcgcgcggctggttgacctggcggtcagcgatcgccgggtgagtgagaagataatgaaacgttgacgtcagaaacgccatcgttttaccggtaccggtttgcgcctgcccggcgacatcgcgaccttccagcgtaagcgggagggcgagtgcctgaatgggtgtacaattatgaaaccctttcttttcaagggcttcaatcactgccgggtgcagggcgaagtcggaaaacttctgttctgttaaatgtgttttgctcatagtgtggtagaatatcagctaactattgcattaagaaagcgtatccggtgaaataacgtcaacctttcgttggctatgtatgaaattattcaaggtgcgtctgcggcaactgaacgaatcttcgaaagcttagactactaagcgaggcgagggtgacaaatctgcgataagccggtttgaacgctggttgctttatcttttgcggggcaaagttcatgatgggcattgtgatgcagagagataaaagaggcattctgaagaacagcgtgcataacgtagcatcgacacgtcgttgatggccgcgacaccaacacaccaggcttattcctgtggagttaaatatgagcgataaaattattcacctgactgacgacagttttgacacggacgtactcaaggctgacgggctaaccctcgtcgatttctgggcagagtggtgtggtccgtgcaaaatgatcgccccgattctggatgagatcgctgaagagtatcagggcaaactgaccattgcgaaactgaacatcgatcagaacccgggtactgcgccgaaatacggcattcgcggcatcccgaccctgctgctgttcaaaaatggcgaagtggcagcgaccaaagttggcgcgctgtccaaaggccagctgaaagagttcctcgacgccaacctggcgtaagcggcttgttctcccggcgtccagcgtccaattttttgcggatctctggacgcccggcgagagtcgtgctaagttaatctcagacttcgttttaaacatacctttgtttgaatcttgttttacccaaagcgtcccgcaaaaatgcgcgtgaggcttataatccgggcttatcactcattccgtttagtcgtttcagttctgcgttctttcctgtgaccaggcaacgtacagacacgagatgaaggccgttaacaggcatggatgttcctgccataccattcacaacattaagttcgagaattaccccgagtttaagaacccacaccattatgaatcttaccgaattaaagaatacgccggtttctgagctgattactctcggcgaaaatatggggctggaaaacctggcccgtatgcgtaagcaggatattatttttgccatcctcaagcagcattcgaagagtggcgaggatatctttggcgatggcgtactggagatactgcaggatggatttggtttcctccgttcagcagacagctcctacctcgccggtcccgacgacatctacgtatcccccagccaaatccgccgcttcaacctccgcactggtgacaccatttccggtaagattcgtcctcctaaagagggtgagcgttactttgcgttgttgaaagttaacgaagttaactacgataagccggaaaacgcgcgtaacaagattctgttcgagaacttaacccctctgcacgcaaattcacgtctgcgtatggagcgtggtaacggctcaacggaagacttaaccgctcgcgtcctggatctggcatcgccgatcggccgtggccagcgtggtctgattgttgcgccgccgaaggccggtaaaaccatgctgctgcagaacatcgcgcagagcattgcgtacaaccatcctgattgcgttctgatggtactgctgatcgacgaacgtccggaagaagtgaccgagatgcagcgtctggttaaaggtgaagttgtcgcttctacctttgacgagccggcatctcgccacgttcaggttgccgagatggttatcgagaaagcgaagcgtctggttgagcataagaaagacgttatcatcctgctcgactccattacccgtctggcgcgtgcctacaacaccgtcgtcccggcttccggtaaagtgttgaccggtggtgtggacgccaacgccctgcatcgtccgaagcgtttcttcggtgccgcgcgtaacgtggaagagggcggcagcctgacgattatcgctacggcgctgatcgataccggttctaaaatggacgaagttatctacgaagagtttaaaggcaccggtaacatggagcttcacctctctcgtaagatcgcagaaaaacgcgtcttcccggctatcgactacaaccgttccggtacccgtaaagaagagctgctcaccactcaggaagagctgcagaagatgtggatcctgcgtaaaatcattcacccgatgggtgagattgacgcgatggaattcctcatcaataaactggcgatgaccaaaactaacgatgacttcttcgacatgatgaagcgctcgtaagctaaaaacgccagagaacgccacgctattgcgtggcgttttgttttccgggtttgtatgatccaggaagggaaaacaaaatgggtcttaacgtatgatatgcgcaggatgatggcaggcagagacggctttaacagtctaaaatttctacaataaatttgtaatgttctgctttgccccttctggagttgaggcatcatcgttatacttcccggattaactatgctgagagcacatgcgttgtgaatttactcactgctattactgaattaatcagtattttcttattcaccaccctgtttatatttatcgctcgcaaggcggcaaaaagagttgggctggtggataaacctaactatcgcaaacggcatcagggtttgattccgttagtcggtggtatttcagttttcgcaggtatttgttttacgtttgctatcgccgattattacattccccacgctcggttatacctgggatgtgccggggtgctcgtgctggtcggtgcgctggacgatcgctttgatatcagcgtaaaaattcgcgcggtaattcaagccgctatcgccgtcattatgatgatggtgggtaatcttcatcttagtagcctcggttttatattcggctcatgggagctggtgctcggcccttttggcttcttcctcacgctgttcgccgtctgggcggcgatcaacgccttcaatatggttgatggtatcgatgggctgcttggcggtctatcgtcagtctctttcgcggcaacgggcattatcctgtggtttgatggccagtacagcctggcgatgtggtgttttgcgatgatcgccgccattttgccctatattttacttaacctcggtgcgcttggtcgtcgctataaggtctttatgggtgatgccggcagcaccatgattggcttcactatcatctggatcctgctggagaccacgcagggaaaaacgcatcctatcagcccggtcacggcgctgtggattatcgctattccgttgatggatatggtggcgattatgtaccgtcgcctgcgcaaagggatgagcccattctccccggaccgtcagcatattcatcatttaatcatgcgcgccgggtttacttcccgtcaggcgtttgtgctgatcaccctggccgccgcgctgctggccctggttggcgtggtggcggaatacacccgcattgttcctgaatgggtgatgttaatactctttttgttagcctttttcctttatggctactgcattaaacgcgcctggaaagtggcgcgcatggttaagcgcattagacgcagaatacggcgacacagcggcaataatccaaattaaccaagtcaatctggggacgtgatgactcaaccattaccgggagcacaaacagtgaacgttgagaacgagctggatattcgcgggctgtttcgcgccttatgggccggaaaaagctggatagcaggtatcgcagtgctctttgcactgattgttttggtttataccttttttgctcgtcaggagtggagcgcgacggcgattaccgaccgaccgacggtgaacatgctggggggatactattcacaacagcagttcttacgcaatctcgatatcaaggccaatctcgtctctgtcgatcagccttcggtcatggacgaagcatataaagagttcatcatgcagcaggcgtcgtgggatacccgccgcgacttctggttgcaaacagactactacaagcagcgccagtcgggtaacgctcgcgccgatgccgcgctgttggatgacctgattaacgatatccagttcatgcccggcgatgcgctaaaaagcatcaacgatagcgtgaagctgacggcagaaaccgcgcctgatgccaacaatctgctgcgccagtatgtggctttcgccagccagcgtgcggcagggcatctgaatgatgagctcaaaggcgcctgggccgcgcgtaccgtacagatgaaagcgcaggtgaagcgccaggaagaggtggcgcgagagattttcaatcgccgcatgcacagcgtggaacaggcgctgaaagtcgcgcagcagcacaacatctcccgcagcgaaaccgatattccaccagatcagctgccggattccgagctgtttttactggggcggccaatgctgcaggcccggctggaaaatctgcaggcggtggggccgcagtacgatcttgattatgaccaaagccgcgccatgttaacgacgttgaacgtggggccgaccctggacccgcgttttcagacttacaggtatttgcgaacgcctgaagaaccggtaaaacgcgatagcccgcgccgcgtgtttctgatggtgatgtgggggattgtgggcgcgctcatcggcgcaggcgttgcgttatcgcgtcgccgtgtccagtgaatgcggcctgtggtgaaggacatgtcgccttcatcgcctaatcgaagagaatcgatgtgaaagtactaacggtatttggcacgagaccagaagctatcaagatggcgcctctggttcatgcgctggcaaaggatcctcattttgaggcgaaagtttgcgtgaccgcgcagcatcgggagatgctcgatcaggtgttgaaacttttttctattgttccggaatacgacctcaatattatgcagccgggtcagggattgacggagattacctgtcgcatccttgaaggtttaaagccggtgctggagtcgtttaaaccagacgtggtgctggtgcatggcgataccaccacgacgatggcggcaagcctggccgctttctatcagcggatcccggtaggacacgtggaagccgggctgcgcacgggcgatctgagctcgccgtggccggaagaggggaaccgtacgttgaccgggcatctggcgacgtaccactttgcgccgacggaaacctcaaggcagaacctgctgcgggaaaacatcgccgacaatcggatcacggtaaccggaaatacggttattgacgcgctattctgggtgcgcgaccgggttttgagcgatgaagccctgcacaacgagctgactcagcgttatcccttcctcgccaacggcaagaagatgattctggtcaccggacaccgtcgggaaagctttggccgcggtttcgagcaaatctgccatgcgctggcggagatcgccgcgaacaatccggacgtacagatcgtctatccggtgcatttgaatccgaacgtcagcgaaccggtgaagcgcattctcggccacgttgagaacgtcatacttattgagccgcaggattatttgccgtttgtctggctgatgaaccgcgcgtggttgatcctgaccgattccggcggtatccaggaagaggcgccctcgctcgggaaaccggtgctggtgatgcgtgaaatgaccgagcgcccggaggcggtcagcgcgggcaccgtgtgcctggtgggtaccgatagccagcgcatcgtcaatgaggtcacgcgcctgctgcaagatgagtccgcgtatcaggccatgagccgggcgcataacccgtatggcgatggacatgcgtgtcatcgtattttgtctgcacttaaaaataatcaggtaacgctatgaatttttctaccatttcagtgattggccttggatatattggcctgccaaccgctgccgcgttcgcctcccggcaaaagcgggtggtcggcgttgatatcaatcaacacgccgtggagaccattaaccgtggtgaaattcatatcgtggagccggatctggcgagcgtcgtcaaaacggcggtcgagcagggctacctgagcgccactaccgcgccggtagaagccgacgcttacctgattgcggtgccgacgccgtttaaagacctgcatgaaccggatatggttttcgtcgagtcggcggcgaaatctatcgcaccgacgctgaagaaagggtcgctggttatccttgagtccacctcgccggtgggttcaaccgagcagatggcgggctggctggcggaaatgcgccccgatctgagcttcccgcagcaggttggcgaagcggcggacgtcaatatcgcctactgtccggagcgcgtgttgccggggcaggtgatggttgagctgattaaaaacgatcgcgtgattggcggcatgtcgccggtttgctcagcccgcgccagcgagctgtataaaattttcctcgaaggcgaatgcgtggtgaccaactcgcgcaccgccgaaatgtgcaagctgactgaaaacagcttccgcgacgttaatatcgcttttgccaatgaactttcgctaatttgcgccgatcaggggatcaacgtctgggaactgattcgtctggcgaatcgtcatccgcgcgtcaatatcctccagccggggccgggcgttggcggccactgcatcgcggtcgacccgtggtttatcgtggcgcaaaacccgcagcaggcgcggcttatccggaccgcgcgtgaagtcaacgaccacaaaccagaatgggtgatcgatcaggtcaaagcgcgggtcgccgactgcctcgccgccagcaacaaacgcgccagcgagctaaaaatcgcctgttttggcctggcgtttaagccgaatattgatgacctgcgcgaaagcccggccatggccattgccgcgcagatcgcccgctggcacggcggcgaaaccctggtcgttgagccaaatattcatcagctgccgaaaaagctcgacggactgtgcgctctggcgtcgctggacgaggcgctggcgagcgccgatgtgctggtgatgctggtcgatcataaagaatttaaagcggtcggcggggatagcgttagccagcagtttatcgtcgataccaaaggggtgtggcggtgagagggcgtctggtaaaagatgaaagcgttcgcagcttcgcgcgctttcatcgtgaccaaaacttaacagatctattttatgttcgcccgcgccagtattgagccccttgagtgggaaaaccgcttcttcggcgtcaatagcgccattctccgctttggcgacgatgcgccgccgctgacggtgcaagcgctggcgggatggtcgcgggtgcaggcgaaagttgcggcggatgataccgcgcgcctggatgcgctgcaggcattaggcttccggctggtggagggcgaggtcgatcttgcgcttccgcccgcggcttctgatgatatcggcgccgagccggcgaccgaggcggatatcccccggctgcgcgaactggcggcgctggcctttgcgcagagccgttttcgcgccccctggtacaccgacgatgccagcggtcgtttctatgcccagtggattgaaaatgcggtgcgcggtaccttcgatcaccagtgtctggtgcttcgcgcccctgacggcgatatccgcgcgtttgtctccctgcgccagctcagcgagcgcgaggcgaggattggcctgctggccggacgcggcgccggagcagaattaatgcaggcggcgcagcgctgggccgcgctgcgcgagctgacgacactgcgggtggcgacccagatgggcaacaccgccgcgcttaaacgttacattcttagcggtgccaatgtcgaaagcaccgcgtactggttatacaggtgacatgatgattccatttaacgcgccgccggtggtgggtaccgagcttgattatatgcagtccgcgatggggagcggcaagctgtgcggcgatggcggttttacccgccgctgccagcagtggatggagcagcgtttcggcaccgcgaaagcgctgctgacgccgtcctgcaccgcttcgctggaaatggcggcgctgctgctggatattcagccgggcgatgaagtgattatgccgagctataccttcgtctccaccgccaacgcctttgtgctgcgcggcgcgaaaatcgtcttcgttgatattcgtcgcgataccatgaatatcgatgaaacgctgattgaagcggccatcaccgagaaaacccgcgcgattgtaccggtccactacgccggcgtggcctgcgagatggacaccattatggctatcgccagcaagcataatctgtttgtggtggaggatgccgctcagggcgtgatgtcgacctataaaggccgggcgctcggcactatcggccatattggctgcttcagcttccatgaaaccaaaaactacaccgcgggcggtgaaggcggcgcaacgctgattaacgatcgcacgctgatagagcgcgcggagatcattcgtgaaaaaggcaccaaccgcagccaatttttccgtggcctggtggataaatatacgtggcgcgatatcggctccagctacctgatgtccgatttacaggcggcctatctgtgggcgcagctggaagcggcggagcggattaaccagcagcgtctggcgctgtggcagaactactacgacgccctgctgccgctggcgcgcgccgggcgtatcgatctgcccatcgtgcctgccgactgcgggcaaaatgcgcatatgttctatatcaagctgcgcgatattgacgatcgcagcaagctgatcgcctggctgaaagaggcggaaattctggcggtattccactatatcccgctgcacagctgcccggccggggagaacttcggcgagttccacgggacggatcgctacacgacccaggagagcgaacgtctgctgcgcctgccgttattctacaatttgtcgaacgttaaccagcgcacggtgattaactcgctgctgagctatttctcctgatatgtcgctggcaaaagcatctctgtggaccgcggcgtccacgctggtcaaaatcggcgccggtctgctggtggtaaaactgctggccgtgtcgttcggcccggctggcgtggggcaggcgggtaacttccgccagcttgtgaccgtgcttggcgtgctggcgggggccgggatattcaacggcgtcacgaagctggtggcccagcatcatgacgatcgccggcagttgaacaacgtcgttggcaccgcttcagcgatggtactcggtttctccaccctgctggcgctgatcttcctgctggcggccgcgccaataagccaggggctattcggtcatcaacattaccagaatctggtacggctggtggcgctggtgcagatggggattgcctgggcgaatttcctgttagcgctgatgaaaggctttcgcgatgcggcgggtaatgcgctgtcgcttatcgccgggagcctgattggcgtggcggcgtactatgcctgctaccgttttggcggttatcagggcgcattgctggggctggcgctggtgccggcgctggtggtggtgccggctgctatcgtactgtggcgtcgcggcaatattccgctaagcgcgctgcgcccgcgctgggacaacggcctggcggggcagctgtcgaaatttaccctgatggcgctgattacctcggtgacgctgccggtcgcctacgtgatgatgcgtaacctgctggcggcccactatggctgggacgcggtggggatctggcaaggggtgagcagcatctccgacgcctatttgcagtttattaccgcgtcatttagcgtttatcttttaccaacgctgtcccgtctgacggcgaaagcggatatcacccgcgagattggcaaatcgttaaaatttgtcctcccggcggtggcggcagcgagcttaacggtgtggctgctgcgtgatttcgctatctggctacttttttccgaccgctttacggcgatgcgcgatctgtttgcctggcagctggtgggcgatgtgttaaaggtcggggcttatgtttatggctatctggtgatcgccaaagcctcgctgcgtttttatattctgacggaaatcagccagttcacgctgttgaccgcattctcgcactggcttatcccggcgcacggcgcaatcggcgcggcgcaggcgtatatggctacctatattgtttatttcgccctctgcagcggcgtgtttttactttggcgtaaacgggcatgacagcactgatacatgtactgggatcggatatcccgcaccacaaccagaccgtgctgcggttctttaatgatgagctggccgtggatgacgaacaggctcgcctgtttatggtcgtcggtgatgcgacagaaatttgcgccgcttatcccgcactctccattcgctgctatccggggaaaaagtcgctggcaaaggcggttatcgcgctggcaaaggcgaaccggcagcagcgctttttctttcacggccagtttaataccggcctgtggctggcgctgctcagcggcgggatccgcccgacgcagtttaactggcatatctggggagcggatctgtacgagaactccgccagcctgaagtttcgcctgttttatcccctgcggcgcctggcgcagggccgggtaggtcgcgtgtttgcgaccaggggcgatctgagctggttcgccgcccgccattctggcgtagcgggagagctgctctactttccgacccgcatggatccggcgctgaattcgctcgccgatagcgcgccgcgcggcgacacgctgactatcctggtgggtaattccggcgaccgtagcaacgagcatatcgcggcgctgcgtgcgattcgccagcagtttggcgatacggttaacgttgtcgtgccgatgggttatccggcaaataatggcgactacatcaacgaagtccgcgcggccggcgcggagctgttcagcccgcagcatttccaggtattgggcgacaagctggcgtttgatgactaccttgccctgctgcgccgctgcgatcttggctacttcctgtttgcccgccagcagggtatcggcacgctgtgcctgctgattcaggcggggatcccctgcgtgctgaaccgggagaatcccttctggcaggatatgtcggagcagcatattccggtactctttaccagcgatgcgctggacgtgagcgttgtgcgtgaagcgcagcgccagctggccggcgtggataaaaatcaaatcgccttcttccggccgaattacctgacgggctggcgacgagcgttgcgaattgctgcgggggtggacgcatgacattaatgcaatttagcgggctgctgctggtctggctgctgtcgacgctatttatcgccaccgccacgtactttgaatttcgtcgcgtacgcttcaacttcaacgtctttttctcgctgctgtatctgctgacgtttttctttggcttcccgctgaccagtattctggtgttccgctttgacgtcgcggtcgccccgccggaaattctgctgcaaaccctgctggtttccgtctgcttttatgcggtttactacgtgacttataaaacgcggctacggtcggcgacgcacggtcatccgcatcgtccgctgtttacgatgaatcgcgtggagacccacctcacctggggcattttgctggggctggcgctgctttgcgtcggcatcttctttgcgcataacggcttcttgttattcaagctcaactcctacagccagatcttctccagcgaagtctccggcgtggcgctaaagcgcttcttctactttttcatcccggcaatgctggtggtctattttctgcgtcaggattataaagcgtggatattcttccttgtcagcaccgtcgcctttggcctgctgacctacgccatcgttggcggcacccgggcgaatatcatcatcgcgtttgccatcttcctgtttatcggcatcattcgcggctggatcagcctgtggatgctggcggcggcgggcgtgctgggcatcgtcggtatgttctggctggccctgaagcgctatggcatgaacgtcagcggcgatgaggcgttttatactttcctctatctgacccgcgacaccttctcgccgtgggagaatctggccctgctgctgcaaaattacgacaagattgagttccaggggctggcgccaatcatccgggatttttacgtctttatccccagctggttgtggcacggtcgtccgacaatggtgctcaataccgcgaactatttcacctgggaagtattgaataatcattctggtctggcgatttcgccgaccctgattggctcgctggtggtgatgggcggcgtctggttcgtcccgctgggcgcggtggcggttgggctgattattaaatggtttgactggctgtacgagcttggcaaccgggaaacgaaccgctataaagcggcgattctgcacagtttctgttttggcgctatcttcaacatgatcgtgctggcgcgtgaagggctggattcatttggctctcgcgtggtttttttcctcgttatctttgggatctgcctgctggcggcaaaactgctgtactggttccttgatagcgtggggctgattcaccggcgggccaaaccgctgacgcaacctcaagtctgataagggtgtacatgactgagaccacatccgcgccgttgtacctgctgagagggctacaactcattggttggcgcgatatgcaacacgctctggattatctgtacgccgatggtgagatccgcacgggaacgctggtggcgattaatgcagagaagatgctggcggtagaagacagccccgaagtccgggcgctgattgaagcggcagaattcaaatacgctgatggcatcagcgtagtacgttcattacgtaaaaaataccctcaggctcaggtgtcgcgcgtcgccggcgccgatttatgggaagccctgatggcgcgcgcaggcgctcagggaacgccggtatttttgatcggcggcaagcctgaggtgctggcgcagacggagcagcagcttcgccagcgctggaacgtgaatatcgttggaagccaggatggctattttgccgctgaccagcgtcaggcgctatttgagcgtatccgcgatagcggggcgaaaatcgtcacggtggcgatgggctcgccgcgtcaggagatcctgatgcgcgactgtcgggacgtttatccgcaggcgctgtatatgggcgtgggcggcacctacgatgtctttaccggccacgtccagcgggcgccgaagttctggcaggacctgggtctggagtggttctatcgcctggtttcgcagccgagccgcataaaaaggcaggcgcgcctgctgcgctatttacgctggcattacaccgataagctgtgacattccactgcaagcgggcgggtttacctgggtattctgtgtaatgtcttcactcgcctgatactttatttgccatttccctcaaattcattaaccattcgcatgcttaaaacgcgacggtcagtttaccgtcgcgcaggcagggctatttattcaataaaaataaccggcatagacacatcccggttgggatgcgcttaaacccggagcagggcaaacacaagaggctatatgactgagaaaaaagcggaacttcagcggggactggaggcgcggcacattgagctaatcgctcttggtgggacaattggcgtcgggttatttatgggcgcggccagtacgctgaagtgggccggaccttcggttctgctggcgtatattatcgccgggctctttgtcttcttcatcatgcgttcgatgggcgaaatgctgttcctcgaaccggtaaccggatcgttcgccgtttacgcacaccgctatatgagcccatttttcggctatctcaccgcctggtcctactggtttatgtggatggcggtcgggatatcggagattacggctatcggggtttatgtgcagttctggttcccggatatggcgcagtggataccggcgctgattgccgtcgggctggtggcgctggcaaacctcgcggcggtacggctgtacggcgaaattgaattctggtttgccatgattaaggtcaccaccattattgtgatgatcgtggtggggctgggcgttattttctttggctttggcaacggcgggcacgccattggctttggcaatctgaccgagcacggtggcttcttcgccggcggctggaagggcttcctgacggcgctgtgcatcgtggtcgcgtcttatcagggcgtcgagcttatcgggattaccgccggtgaagcgaagaatccgcaggttacgctgcgtagcgcggttggcaaggtactgtggcgaatcctgattttctatgtaggggcgatttttgtgatcgtcactattttcccgtgggatcaaattggctccaacggcagtccgttcgtactgacctttgccaaaatcggcatcaccgcggcggcgggcattatcaactttgtggtgctcacggcggcgctttccggctgtaacagcggcatgtacagctgcggccgcatgctctacgcgctggcaaaaaaccgtcagctgcccgcggccatcgccaaagtttcgcgcaacggcgtgccgtcagcgggcgtggcgctgtcgatcctgattctgctggtcggctcgtgcctgaactacattatccctaatccacagcgagttttcgtctacgtttacagcgccagcgtgctgccggggatggtgccgtggtttgtgattctgattagccagctgcgttttcgtctcgtgcataaagaagcgatggccagccatccgtttcgctcgctgctgttcccgtgggcgaactatttgaccatggcattcctgatttgcgtgctgatagggatgggatttaacgacgatacgcgtatgtcgctctttgtcggaatgattttcctcgccgccgtaacgcttatttataaggtatttggccttggccgacgcggaaatgttgataatgtggcgcaataagcaacaaaacgcacaaagcatgagcaaacaataattttctttaaaaaggcactagacagcggggtaggaagtccgtattatccgaccccgcaacggcgctaagcgcccgtagctcagctggatagagcgctgccctccggaggcagaggtctcaggttcgaatcctgtcgggcgcaccatttacccggtgctggagctgcggtggtttcaataccgcgtaaaagatttgcagtggtggctatagctcagttggtagagccctggattgtgattccagttgtcgtgggttcgaatcccattagccaccccattatttagaaagttgtgatattgcgaaggtggcggaattggtagacgcgctagcttcaggtgttagtgttcttacggacgtgggggttcaagtcccccccctcgcaccacgactttataaagaattgaactaaaaattcaaaaaagcagtacatcggcgagtagcgcagcttggtagcgcaactggtttgggaccagtgggtcggaggttcgaatcctctctcgccgaccaattttgaaccccgcttcggcggggttttttgttttccgcgtctgcaaaaacgttcctatctccctgatatcgcaaaaaatatctcgctaatcagcatgcgatttattgtccagaatagtcccaattccttgtgcggatagatgcattttctaccgatcctgtgcgataataaacgggtagatgctcattccatctcttatgttcgccttagtgcctcataaactcaggaatgatgcagagccgttttacggtgcttatcgtccactgacagatgtcgcattttatatgctaaatcattcatgatgtgtcgagacggccagcacgggaatccccccggagcttacaaaggtaagtgactggggtgagcgtgtgcagccaacgaagagacagcgtgaaggatgaagcatatagcctcatcaaacaccatggacactacgttgagtgaagcacccaatttgttgtcaaacagacctgttttaacgcctgccctggtttcagagcaggcgtttttttcttttcagggatagagaaacgctcaggcgggaagagaagagattctcgcccccgatggaggcgagaagggcattactgctgcgggttgttttgcagggttaacagcaggccgtcgcgacgcatcgtcgccgcttcttccggctgatgcaggcgatcaagtgtatcggccagccacgcgtagtcaaacgcatccgggcgctgcttgagcgctgcgcggaacgcgatgctggcttcctgccactcgccgtgacgcatgagcgattgtcccagcgtactccacagcagcggacggtcgccgaccgttttgatctgctggcgcagcaccttttccagctgttccggattattcgttttcagccgcgggatcggcatcaccagacgatcgtcgtagtgctttttcagaccttcgataataatctgctgcgcggtatcatggtcgtcgctttcgataaggcgattagccattgccacctgtagcgccacctggctgcgggtttttcggttctggcttttccaccagtcgcgcagaccttcgctgccgccgtcggccagcgttttatccatcaggccaatccacgccagctgttccagttcggcacggtgctcctcatcgctgacgttggctttcgccattgatggaatgatatccagcagcgaattccaggcgccggtacgaatgtaggcctgctcggcgaggcgcaggacctccggatgacgcggcgtgatctccagcagcttgtcgatgccgtggcgggcggcgtggttttcattacgcgccagctgcaggcgtacgcgggtgatttcgacaggtatcaggtcgtcgccggcgagctctgtcgcgcgctccagatgctggttggcgcgggcttcatcgccacgctgctgggcggcttctgccgccagcaggtagttcacaacgggctgctcagcgtgatcggcatttttcgccatcagcttctcaacctgctgataatcgccctccgccagcttcagcagcgcctgctcggtttgcttacgcgcgcggcgacgcttgcggcccacgaaccagccgcgggtatgtgcgccggtgcggaaaatgcgccgcagcagccactcaatggcaaacagcactaccatggtgaggatcatgatgatcgctaacccggtgacgctggtttcaatgttgtaattatcggtctggatcaggacgtagccctgatgacccgcgatcatcggaccgaccacgatcccggcaagcagcagcgcgaagagtaagagaattttcaacatgcgttactctccttgtggcgcaggcgttggcgcgtgggcagcaggtgccggcgcgggagccggggcgctggcctgggtttcagccggctgcgccatcagattacgtacccgcgtttgcatcagtttctcaagcagcgcctggctctgcaggctctccggtacgttcatggtgatgctttgctggctgagcttatccacgtcctcaaggaaggctttggtggtggcatcttcagtgtcgtagtaagcacgaacccacgtcgagacgttatccagcgcctgtttgtaggtttcttcctgatgacgcggaaccgcctgcgccgcgaccagcagacgggagcggatgttttcgcgcagatagacgtcctggtttggcgccagcagcggcacggcggtctcatcgcggcggcgaacggtaataaagctgtccataaagttctgccagcttttttgcaggtttacccgccactcgctaatggagctggatagctcatcgctatcggaatccatcggggtatcatcgtcgttgttgtccgccaggcgtaaattatcgatctggttggcgagctggttcactttcagaatgatgccgtcgtagtcgacctgactcacggcggaaagcgaagcaatatcgtcggtaatggcgcgacgggcggaaatcaggctcggatcgttcatatcggcgaggctggcgtcggcgcttttcagcagcgcggcggcggtcgtcacgtcctgatcgctccacagcttacgtccggccagttttacgaggaaatcagcctgcgcgagcagccaggtttttgcatcgctgccggaaatgaccgcgaccttctcctgcacttcttccagcttcttcgccagagaatcctgctgacgctgcgcttccgtcagctggtcggcctgctgcttgatgatgccttcaagctcgcttttttggctctcctgcgctttttgcagcgcggcgatctggctggatagcccggcgctggcttcgctctggcgggttgcctgagtcttcgtcagaccataaaggcctacgccagcggcgagggcgatagcgatagctatagcgctcagggcaaggctggttttactgccgccgtttttcttttcgacattcttctctggctgtggcgtcgtttccacggcctccctggtctcttcaaccacggcggattgattctgttgttccgtcattatggcttccaatgttgagagttattgtaatgcgcgtagcagcgcatcgttgtcggcgctatcggcaacctggatatcctgccagcccaattccctggcctgctcggccagacgttcactgacaacgaaaatgcgacagctcaggagccaacgttcgcgataccactgtggtattagcgtccagagctgctgcagcatctcgccgctggtgatgaccagcgtcgaaaccccgcgagactgccagcgcattgcttcttctgcgccatcgtagtgccttgcactacgttgataacattcacaaaaagtgacatcagcgccgcgttcgcgaagcgtgtcaccgagtaattcccgcccgccgttgccgcgcaggatgagcgcttttttccccgcaatgttttgtaattcaggtaattgtagcaagacttcgctgatttcccgatctaacgggtagcgaacttgtcgattactgaccttatgcagggccagcgcggtggtgcggccaatggcaaaatagtcgggcgccgtgggccagcgcagcccctgctgctggaggcgagcgtgggcaaactcgacggcatgctgagatagcgcgaagagtaaatcgcctgcggcgaggcttgccagctggccgcccagctcagggagctgacggcccggggtaaactcaatgagcggaaagctccaggccacgcgtcccagcgcgcgcaggcggctgactaactcttcgccttgcggcagcggacgggtaaccagaatgctcattgaggcgcttctcctgcgtagacgacggcgagaatgtcgcgagcgccgttatccagaagttcttcggcaagggcgacgcccagcctttcggcatcttccgggcaaccgcgccgctcgccgcgtaccgtgtgtgagccatccggcgcgccaaccagcgcgcgcagccatagctcaccgtcgatcagttcggcatagctgccgataggcacctgacagccgccttcaagccgggtgttcatcgcccgttcagcgcggacgcggatggccgtttccgtatgattcagcggggccagcagcgttttggtccattcgtcgtcaaggcgacactcaatgccgaccgcgccctggccgacggcgggcagagattgctccggggacagcggttgacgaatacgcgcctcaaggttcaggcgcttaagtcctgcggcggccagaataatggcgtcgtactcgccgctatcaagcttgcccagacgcgtgccaacgttgccgcgcagggagcggatcgtgagatccggccgcgcggcggccagctgacactgacggcgtaaacttgaggtgccaacgatgctgccgtgggggagttcatcaatggaagcgtagtgattcgagacaaaggcgtcgcgcggatcttcgcgttcacagatggtcaccagccccagcccttcgggaaactccaccggcacgtccttcatagaatggacggcaatgtcggcgcgaccttccagcatggccagctctaactctttcacaaagaggcccttaccgcccacttttgcaaggggcgtatcaaggatcacgtcgccgcgggtgaccataggcaccagctcaacggaaagccccggatgacaggactccaggcgctctttcacataatgtgcctgccatagcgcaagcgggctttgccgtgtggcaattctcaaaactttgtctaacatgcttgttaccgtcatagtcgaccactaaccatcctaacattgttgtcttagggatgttagttttgtggggttaagggtcgcggccatttttttagcctttcatgcgtttgcgggttgccgcaaacgtagtgaagaatttacacgtagtaaagggtgctacacttgtatgtagctcatctttctttacggtcaatcagcaaggtgttagattgatcacgttttaaaccatttgtcagtcagcagttcatcacaaccacaccgacgacgaatggtgacggtttttgttgaaatactgaaactctccgtactattgtacgtcgggtttttgaacatcaggcgatatgtcttgtacctctatattgagacactgaaacagagactggatgccatcaaccaattgcgcgtggatcgcgcccttgctgccatgggacccgctttccagcaggtttacagtctactgccgacattactacattatcatcatccgctgatgccgggttaccttgacggtaacgttccccgtggcatttgcctctacacgcctgatgaaacccaacgtcactatcttgatgaactcgagctcaaccgtggaatgctggccaaagagccgccgaaaggcgagctgccgattaccggcctttactctatgggcagtacttcttccgtcggccaaagctgctcttccgacctggatatctgggtttgccaccaatcatggctggatagcgaagagcgccagctgctgcagcgcaaatgtagcctgctcgagagctgggccgcgtcgctgggcgttgaggtcagcttcttcctgatcgacgaaaaccgcttccgccataacgaaagcggcagcctgggcggtgaagactgcggctcaactcaacacatcctgctgctggatgagttttaccgtaccgcggtgcgcctggccgggaagcgtattctgtggaatatggtgccgtgcgatgaagaagaacattacgacgattacgtgatgagcctctacgcgcagggcgtgctgacgccgaacgaatggctggatctcggcggcctgagctccctctcggcagaagagtacttcggcgccagcctgtggcagctgtataaaagtatcgactcgccctataaggccgtgctgaagacgctgctgctggaagcgtactcctgggagtaccccaacaaccgtctgctggcgaaagatatcaagcagcgcctgcatgatggtgaaattgtatcgtttggccttgacccttactgcatgatgctggagcgcgtcacgctctatctgcaggccatcgaagatgaaacgcgcctcgatctggtgcgtcgatgtttctatttaaaagtgtgcgagaagctgagccgcgagcgcgcctgcgtcggctggcgccgtgaagtcgtcagccacctggtgaaagagtggggctgggatgaaaagcgtctgatgatgctcgataaccgggccaactggaagattgacgaagtccgtaaagcgcacaacgaactgcttgatgcgatgatgcagagctatcgcaacctgattcgctttgcgcgccgtaataacctgagcgtttccgccagcccgcaggatattggcgtgctgacgcgtaagctgtacgccgcctttgaagcgctgccggggaaagtgaccctggtaaacccgcaaatttcgccggatctgtctgagccgaatctgactttcatccacgtgccgccgggccgtgccaaccgtaccggctggtatgtctataaccgcgcgccggacatggaatcgatcatcagccatcagccgctggaatataaccgttatcttaataagctggtggcctgggcctggtttaacggcctgctgacgtcacgcacacgcctgtttattaagggcaacgggattgtcgacctggcgaaactgcaggagatggtggccgatgtggcgcatcacttcccgctgcgcctgccgtctccgacgccgaaagcgctgtatagcccctgcgaaattcgccacctggcgattatcgtcaacctcgaatatgacccgacggcggccttccgcaatcaggtggtgcatttcgacttccgcaagctggatgttttcagcttcggcgaagagcaaaagtgcctgattggcagcatcgatctgctgtatcgcaactcgtggaacgaggtgcgcacgctgcactttaacggcgagcaggcgatgatcgaagcgctgaaaaccattcttggcaagatgcaccaggacgccgcgccgccggatagcgtggaagttttctgctatagccagcatctgcgcggcctgatccgcactcgcgtgcagcagctggtgtctgaatgcgttgagctgcgtctttccagcacccgccaggataccggccgttttaaagcgctacgcgtttccgggcagacctggggactcttcttcgagcgtcttaacgtctcggtacagaagctggaaaacgccatcgaattctacggcgcgatttcgcataacaaactgcacggcctgtcggtgcaggtggaaaccaaccacgtcaggctgccgcaggtggtggatggttttgccagcgaagggattattcagttcttctttgaagatgcggataacgataacggatttaacatctatatccttgatgagagcaaccgcgccgaggtgtatcaccactgcgaaggcagcaaagaagagctggtacgcgacgtcagccgcttctactcttcgtcgcatgatcgctttacctacggctccagctttatcaactttaacctgccgcagttttatcaaatcgtcgacgtcgacggccgcgaacaggtgatcccgttccgcagccaggtgattgccgcggccacccttgctgcaggtgaggattccgcgacatcatcgatgttgcagcactactcatgacccgccgcgtagacctgtcattcggcgcaggtaaatttcccgggggcgcttcgcttgcccgggcttcgtggtgatatgggttttgtcgcccggatacggcgttagccgcaatccggggaactcgagtcacgcgcgtttagcgaaaactcaccgcttcaccggcctgcgcggtcgccgcctgttccagcagatcccagaaggtttcgccgctgcggtcgcatacccactcgtcgcctttcaggtcgaaatggtagccgccttgttttgtcgccagccatacctggtgcagcggctcctggcggttgataataattttgctgccgttttcaaagctgatagtcagcacgccgccgttgatttcgcagtcgatatcgctgtcgccatcccagtcgtcgagacgctcttcgatggtcatccacagggtatcggccaggcgatggaattcactgtcgttcatggttctttcccgcttttttgatcgtggcggcagtatagcgcaatctacgatgacttcggcagatggcgaaggcggatcagcagtagagacgtcacgatcgccatcgccagcagcccgtaacgcgcgctcagcatccggctctgttgataatgctgaagaaggccagagagatcggcgggcgccaggttttgtgtctggatcagctgatggaaagtccgatcgctcgtccaggggataaacgtgagatggccgatggcctgtcgggcggccaggcccattgccgggtcgtgctgtacctgatatttcatcaggaaggtcaacaccgtgagcatgacggtactgattaacgccattcctaatgcctgcccgatatcgcgcgaggcggcctgaacgccgccggactgttcggcgtgccgattccctgcgccagtggtgaccagtatcggggcattggccgcgatggtgcccatccccgcgccgattaaacaaagccctgacgccatcagtacaggggtaaaccccgttacgtgcagcgccgcggcggcgaccagagcgccggcgattcccgccgtcagccccatctggcactggcggcgagggtttcgctgctgaataaacagcggcaggcccagcgaacaggcggcgagacatatcgcaaaagggagtatcagcagccctgtttccatcgccgatacgcttttaacaatctgcgcaaaactcaccacggtaaaaatagccgaactgtaggcaaaaaatatccaaccggtgagatagagcccgtggcgcaccaggcgggttttcaggaaaaccgcggggagcagagcgtggccggtggtggcttcaaaatgacgttcccagcgcagcatcatcatcagcaccatcaggccgcagagaataacgaaaggggcggggctcaggccgagaacgctcactgccgggtcgaagggcataaccagcccccagaccgggatgcgcagaataccgaaaatcgtcaggaacagccccagggtgcctaacagaaagcccagggtatcgaaggcgatagcggcgcgtttgttttctgatgccgggatgatgacggagcagagcaggataagcagcgccagcaggccaagcgaggcaaacgcgatgcgccagccgacgtggtccagcaaatatccgcatacaattggaccacaggcgaatgaaatgccgctggaggcgcccagcgcgccaaaggcggcaacccgtcgtcgctgctgatacagggcagagatcaggccaaaaacggcggggatcatcaggctaccgcctatcccggcggtcagacgcgcgccccaggtaaagagcgcgatcgatggcgaaaaaaaggcgcaggcttcggcgaggataaaaatcaggcagccgatgcgaaacagcatccgccaaccccagatacaccccagcattccgcctgccaccataaacgtgcccgcaaccaacggatacatggtattcgctgtactgacctgcccaagcgtggcgtgcagatcgttcattagcgcctgcgtggcgatacttaacgtcacgttatcggcggaagccagaaactgtgcgcagcataagacaaccaaaggtaaccagtttgtcggtgtagggttggtggtcacagcgtgttcctttttgatagaaacgacaaaacgcgcccttcctcgcgggaggggcgcgttattgttagttatctttcgatcttaactcagattttcgacttcttcgcacgcggctcttctcctgctgcgtcatcagaacccctggcgcggacgggaagattgcgcgtcccgaataaaaacagcagcgtcatgaccgcggtggcgaccatccccgctcgcgtggctttcaggcgggcggttttatagacctggttgagttccgttacatccttctgattcacgccctggtccagcatcagcgttgagaaacccgtatcgctgagataaggaataacggaaagatttgccaccttctgctgtgtatcctggcttagcgaagagtcgtggctggccatatcctgtaccgtcatggtgaccgccgtcagcatcaccataccgcaaaccgccacgccgattgcctggccgacgttacgcgaagtcgcctgcacgccgccggactgctgcgcatcgcgcgccggcagggcgctggtaacaatatagctggaataggcggaaacgatgcccatactgatgccaatcagacacatccctaccggcacgatcatgctgaaatcggacgggccgaagccgaagatgcacaacacggagcccagcgtgccgatgagcagcgcgctctggcacatccgtttcggattcgcgtttttccagacgatcggcagccccagcgaaaagaccacgacgcccagcgcaaacggcagaatgagcaagccggtttcaataccgttcagcccggcaaccacctgtacaaagctcacggtcacaaaaataccggaaccgtaggcgaggaagataaacgccgtcagatagagaccgttacgcacctgcggcgttgcgaggaacgacagcgggatcagcgcgctgccggtggtggcttcgcgatggcgctcccacttcagcataatcgccagcacgatcaggccaaacaggacgaggaacggcgccgggctaagacccatgacggtgaacggcgcgttaaacggcgtaaacagaccccagctcgagactttcaggaagccgaggatcacgctgaacaggccgataacggtcaggacgacgcccggcagatcgaacaccactttgcgttcaggttttgccggcgtagggacgaggaaagagccgctgaagatcacgatgcacaggccggcgatagcggcaaacgcggcgcgccagccgaggtggtcaaccagcaggccgcaaatcaacggaccggcggcgaaggagacgccgcttgccgcgccgatagcgccaaaggcgatcgcctgctggcggcctttatagttactggcgataagccccagcaccgaagggatcataaagcttccgccaataccggaaagcagacgggcgccgtaggtgaagaccagcatgttcggtgagaaataagcggtcagctcggcaagaaacagcagcgcgcagccgatgcggaaggttttcttccagccgacgataagcccggccatcccggcggcgaccatcagagagcccgcggccagcgaatacatcgcgttggcgatgctgatgagatccattgacgcgtgcaggtctttgaccagcgcgccggtagcgatgctcagcgtggcattatcgccggatgtcgaaagctgagcgaggcacagcaccagcagcggcaaccatttcatcgccgtatcggcggccgcgttgcgcgacatgccgggagagttaattactgaatttgtcgtcatgatcgtgttctgtggttaatttcaggcaatctacacatcatccttcaagctgcctctgtgctggctgcctgcgttcaccccggtcgcttactgtagtaagtgaccggggattctctcaggtgccgccttgatgcaacgtgaatgattttgtgcaatagctatccgcccgacgccgccgccgggtggataatgttcgcaacaggattactggatttgctgtttcttaccgcccagcacggtgccccagaccttcacatctttaagctgaaccggctcgatggcctgcggatcgtcttccagcacggtgaagtcggcgtatttaccgcattcgatgctgccgatcagatggtccattttcatggtccatgccgcgccgagggtcatcgcgtgcagcgcttgatcgacggagattttttccgcttcgcccagtacgcgcccggatgccgtcaggcggttcaccgcgcaccagccggtgaacagcgggttgatgggggtgatgccgcaatcgctgtggaaggcgaaaggaataccgtggcgcaccgcgctgccgcaggcgtccatacgcattgcgcgctccgggcccatggtttggctgtagtgctgatcgccccagtaatagacgtggttgctgaaaaaattcacgcccatacccatctctttgatgcgtttgaactgatcttcacgcagcatctgcgcgtgctgcatcaccgctcggtggttcactgccggaatacgattcagggttttctcgacggctttaatgaacgcttccgaggcctcgtcgccgttacagtggcagtgaacctggtagccgcgggacatgatgtcgtagacctgctgctccacctcttccggcgtggcgttccacgcgccgttgtggccatccagataatagaagggctccagcatccgtcctgacccaccctggatagagccgtcgaggaagattttcatcgggccgaagtgcattttttcgtgcccgtgacgcataacgtccggggcgaaatccagcgcttcctggaagggttttttgacgaaaggaggaccgtaggccaccagcagacgaattgggaagtcctcttcacgggtcatgcggatgtagttggtcatcagctcgggattgctgaaatcggtcagacccatatcggctgcgctggtgcagcctgcgcgaaatgcttcctggccgaaattggcgatggcgatttcggtggtgagttcgtcccagaaaccatatttattcaggattggccccatggcggcgaactccaccagctcgccgtgcagcgtaccgtcctgatttttcaccacgccttcaatctggcaatcgtcaaatattccgcagtcgtgcagcgcggcggtattggcgcccatcaggtggatgctcatatggataaccgcgaccggacgggtggttgagacgcggtccagatgttcgcgacccagcttttcgctgccgaaataaatgggatcaacgccccatgcgatcagcggcgcgtgcggatcggtcatctcacgttccaccgcctgcagcgcgctgacgacgtcgtcaaaagagcggcagcctttccagactttaccggtatggtccgggcgatcgtagtaacccacataggggaattgccacataccgccgccggtgacgtgcgagtgggcttcaatcaggccgggcattaacactttatcggcaaaggtctcgtccagctggtattcgccaaagccggtgagttcttcaagcgtgccggtgcctaaaatacggtcgccgcgcaccgcgacatgggtggtctccgggcggttcgggcacatcgtaatgatttttttagcggcaaaaatcgtgatttctgatgctgacatagtaggctcaatcattgagggttcagagagcgatgaaaggcgtcgctttcatcatgagtattaatgcgcctatgctaattgtcatattggatgtataacaggaccaaaaacccacgatattaaggtgccaatttgtcggttgctctgccttttgatttaacgggtataaagctggatgctggcagaaagcgtagcgagcagctttatcgcgccctgagagagaagatggtgaatacgcccggtcttcacggggctaaactacccgcgacgcgtgagctggcgcggctgctgggggtttctcgcaatacggtggtctcggtctacgagcgtttatatgccgacgatttgattgaaacccgacagggcgacggcacctatatacgttatcgcgggcaggaggttgacgaaggccccgacgtccctgaaattcctgccttacgcgtcgactcgcgcctgccgctgacggcgcggtttaatcgccattttgtgcacgatggcccgccgaaggcttttcgcatcggcatgcccgcgattgaccatttcccgtttgatacctggtcgcgcttgcaaaaccgcttctggcggcggcgacccattgcgcaaatgggttacggcgttccggcgggcgatttacagctgcgcgagcttatcgccagctatctgcatacctcgcgcggcctgaagtgcgatccggctcaggtgattattacccttggcgcacaacaggcgataatgctctgttccgcgctgctgctgcgcgtcgggcaggacgtcattatggaaaacccctgccactgggcggcggcgggcgtattctcctgccttggtttgaatattaaagcgattaacgttgatgatgaggggcttcagacggcgcagttgacggattatcccgacgcccggatggtctacgtgagcccgtcatgccagtacccgacgggcgcgacgctctcgctatcgcggcggatgacgctgctggagtgggccagaaagcatcaggcgtggattatggaggatgattacgacggcgagtatcgctataacggcacgccgctgatgccgctcgccgcgctggataaccgccatcgggtgatttatatcggttcgttttccaaagtgatgtatcccgcgctacgcctgggctacatggtggttccgcaacagctggtggaaccgctgaacctgctgcgtacgctatccacccgccagccgccaatgaacgaccagcaggtgatggcgagctttatttcggagggtcatttccagccccatatccggcgaatgcgcagaatcagtaaaagccgtcgcgatctgctgctggccgagtggaatcagcatctgagccatattggcgtgatgccggaagtggcctcggggttacatgcggcgattacgctggatgatgctgaaacagaaacccgtctcgttagccaggcccaggcggcaggcgtggaaattacgccgctgagcgcattgtggatccccggtacgcctgaaagccgccatcattacggcgtggtgctgggatttgccggcgtgatggaagcggatattgtgcagtcgatacaggcgctaaaaaaatgctggcagtgaccctgctaaaatgaatcatcagcgtatatctaccaacgcgtttgcgctgtaaccctggtggaaagccgcttttcagatgtcataaagctgccctaaacgcttgcttttacgtcttctcctgcgatgatagaaaacagaaagaatgaattacgggctactatccatgaaaaacgttttcccagcgcttgccgttttatttgcggtcctcagcctcaccggctgtggtctgaaagggccgctctatttcccgccagcggataaaacggcgcctccgccgactaaaccggttgatagcggtatccagagctctacgccggatcgtaacgatcgcggtgatagcggtggtccgacccaggtgaattactgacagttccgcgctgctggagtagatgatgcagttctctaaaatgcatggccttggcaatgactttatggttgttgacgcggtaactcagaatgtttttttctcaccggaactgattcgtcgtctggcggatcggcatcttggtgtgggcttcgatcagctgctggtggttgagccgccctacgatccggagctcgacttccactatcgcatcttcaatgccgacggtagcgaggtggcgcaatgcggcaacggcgcgcgctgtttcgcccgctttgtgcgcctgaaaggcctgaccaataaacgtgacatccgcgtcagtacctcgaacggccgtatggtattaagcgtaacggaagacgatctggtgcgcgtgaatatgggtgagccaaacttcgaaccgtcgcaggtgccgttccgcgccaacaaagcggaaaagacctatatcatgcgcgccgctgaacagacagtattgtgcggcgtggtgtccatgggcaatccgcactgcgttatccaggtcgatgatgtggaaaccgcgacggtggaaacgctcggcccggtgatggaaaaccacgagcgcttcccggagcgggcgaacatcggctttatgcaggtggtcagccgctcccatattcgcctgcgcgtgtatgaacgcggcgcgggtgaaacgcaggcctgcggtagcggcgcctgcgcggcggcggcagtcggtatccagcaggggttactgggcgaggaggtccgcgtggaattacccggcgggcgtcttgatatcgcctggaaaggtccgggccaaccgctgtatatgactggcccggcggcacatgtctatgacggatttattcatttatgaaacaagtcggggaagaacagcaggaactcgccagcgagctgaacgatcgcgcagtggtggactatctgttgcaacatcctgaattctttattcgtaatgcggcgctggtggagcatatgtcggtgccgcatccggtacgtggttcggtctcgctggtggaatggcacatggcgcgggcgcggaaccatatcaacgtgctggaagagaatatgacgctgctgatggcccaggcgacggctaacgaaagcctgtttcagcgcctgtttgatctccagacgcggctggcggcggccgatagccttgatgaaatgctgaaccgctttcatcgctgggcgcgcgagttgggcctggcgggcgccacggtgcgcctgtttcccgacagctggcggctcggcgcgccctccaaattcactcatctggcgataagccgtcaggcgtttgagccgattcgcattcagcgtcttgggcaacagcgccattatcttggcccattaaacggcccggaactgctggtggtgctgccggaagcaaaagccgtgggttcggtagcgatgtcgctgctggggggagataaagcgcccggcgtgatgctgttcagcagtcgcgaccctcagcactatcagcaaggtcagggaacgcagcttttgcatgaaattgcgtcgatgctcccggggttgctggagcgctggatcgagcgcgcatgaccgactcgccgctgtttacgcccgtagaacgctttttacgctatcttggcgtggagcgtcagctgagcccgataacgctgctgaactaccgccgccagcttgagacgcttatcgcgctggcggatagcgccgggctgaaaagctggcagcagtgcgatgctgcccaggtccgtagcctggcggtgcgcagccgtcgccaggggctggggccagccagcctggctttacgtctctccgccttacgcagcttctttgactggctggtgagccagggcgaactggccgcgaatccggcgaaggggatttcggcgccgaaaacaccgcgccatttaccgaaaaatatcgacgtcgacgacgttaaccgactgctggatatcgatcttaacgatccgctggcggtacgcgaccgggcgatgctggaagtgatgtacggcgcgggactgcgtctctcggagctggtgaatctcgacattaagcacctcgatctggaatccggcgaggtgtgggtgatgggcaaaggcagcaaagagcgccgcctgccgattggccgcaacgcggtggtgtggattgagcactggctcgacctgcgcggcctgttcggcgctgatgaagacgccctgttcttatcaaagctgggtaagcgaatttccgcgcgtaacgtgcaaaagcgctttgccgaatggggcattaagcagggcctcaacagccacgtgcatccgcataagctgcgccactctttcgcgacccatatgctggagtcgagcggcgatctgcgcggggtgcaggagctgctgggtcatgcgaatctgtccaccactcaaatttatacccatcttgattttcaacaccttgcgtcggtgtacgatgcggcgcatccgcgcgccaaacgggggaaataatgcgtttttaccgacctctgggccagatttcagcactgacatttgacctggacgataccctttatgacaaccgtccggtgattgaccgaacgctgcatgagtcgctgagctttgtgcgcagctaccacccgtcgctgagtcaatttgacgccagcgaactcaaccggctgcgccagacgctgctggcgtcagagccggaaatttaccacgatgtcaccgagtggcgccgccgcgcgctggagctggggatgatcaacgccgggctttctgcggcgctggcgaaaacgggggccgaggaagcgatggcgaacttcgcccactggcgcagcctgatcgatgtcccgcaggagacgcacgatacgctggcgcagctggcggaaaagtggccgctggtggccattaccaatggtaatgcccagccggagctttttggcctgagcgactacttccgcttcgtgctgcgcgccggtccggacgggcgctctaagccttttgccgatatgtatcatctcgcagccgagcggctggcgctgccgctggggcagattctgcacgtcggggacgatctgacgaccgacgtggcgggctccattcgctgcggcatgcaggcctgttggatcaaaccgcagggcgcagacctgatgcgcaccgccgacagccgcctgttaccgcacatcgaaatttcacggttggcatctctgacctcgctgatataatcgtcagtagttctgtataaattaacagtagcctggtggactgaacgttgccgggcgtctcatttccggcggtgccaatggacgtttcttacctgctcgacagccttaatgacaaacagcgtgaagccgttgcggcatcacgtactaacatgctggttctggcaggcgcgggcagcggtaagacgcgcgtactggtacaccgcatcgcctggctgctgagcgttgagcactgttccccttactccattatggcggtgacctttaccaacaaagcggcggcggaaatgcgccatcgtattggccaactgatgggtaccacccagggcggtatgtgggtcggcactttccacgggctggcgcaccggctgctgcgcgctcatcaccttgacgccaacctgccgcaggacttccagatcctcgacagcgaagaccagctgcgcctgctcaagcgtctgattaaggcgatgaatctcgatgagaagcagtggccgccgcgtcaggcgatgtggtacatcaacggccagaaagatgaagggctgcgcccgcaccatatacagagctacggtaacccggttgagcagacctggcagaaagtttatcaggcctaccaggaggcctgcgatcgggcggggctggtggatttcgccgaactgctgctgcgcgcccacgaactgtggctcaacaagccgcacattcttcagcactaccgcgagcgctttaccaatatcctggtggacgaatttcaggataccaacaacattcagtacgcgtggatccgcctgctggcgggcgataccggcaaggtgatgatcgtcggcgatgacgatcagtccatttacggctggcgcggcgcgcaggtggagaacatccagcgcttcctcaacgatttccccggcgcggaaactatccgcctcgagcaaaactatcgctcgaccagcaatatcctcagcgcggccaacgccctgattgaaaacaacagcgggcgcctggggaaaaagctgtggaccgacggcgccgacggcgagccgatttcgctctactgcgcgtttaacgatcttgatgaggcgcgctttgtcgtcaaccgcatcaaaacctggcaggaaaacggcggggcgctggagcagtgcgcgattctgtatcgcagcaacgcccagtcgcgcgtgctggaagaggcgctgctgcaggccagcatgccgtatcgtatttatggcggcatgcgcttcttcgaacgccaggagatcaaagatgcgctctcctatctgcgtctgatcgccaatcgtaatgacgacgcggcctttgagcgcgtggtgaataccccgacgcgcggtatcggcgatcgcacgctggacgtggtgcgccagacctcgcgcgaccgtcagctgacgctgtggcaggcctgtcgcgagctgttaaaagataaagtgcttgccggacgcgccgccagcgccctgcagcgttttatggagctcattgacgccctggcgcaggaaaccgccgatatgccgctgcacgtgcagaccgatcgggtgattaaagactccggcctgcgcatgatgtacgagcaggagaaaggcgagaaaggccagacgcgcattgaaaacttagaggagctggtgacggcaacgcgccagttcagctacaacgaagaagatgaagatttgatgccgctgcaggcgttcctctcgcatgcggcgctggaagcgggagaagggcaggcggatacctggcaggatgcggtacagctgatgaccctgcactcggcgaaagggctggagttcccgcaggtctttatcgtcggcgtggaagaggggatgttcccgagccagatggcgcttgatgagggcggccgcctggaagaagaacgccgtctggcctacgtcggcgtcacccgcgcgatgcagaagctcacgctgacctatgcggaaacccgccgcctgtatggcaaagaggtttatcaccgtccgtcgcgctttatcggcgagctgccggagtcgtgcgtggaagaggtgcggctgcgcgccacggtgagccgtccggtcagccatcagcggatggggacgccgatggcggaaaacgacaccggctataagctgggccagcgcgtgcgccatgccaagtttggcgaaggcacgatcgtgaacctcgaaggcagcggcgaacacagccgcctgcaggttgcgtttcaggggcaggggattaaatggctggtcgcggcgtatgcccggcttgaaacagtgtaacagtaagaaaagtatcattattttgtaatattctgctacctttatacgttaaggagcttgatttgctctttagcgttccgttgcgtgttgacgccgtttttgcgctggcgtaacatgcgcgcacgattacgctaagaggacattcgccttggacacacccagtagatgctggctcaatttcctgcccatcaggaacaactcctaaggctatcctcttatgctgatagccttagcggttgtcggcgacccgttctattcccgtcgctctgagtcaggcttaatggtctgaaacccaaattgtttctgtgtgcccaccgaactgtccgataattttttgcattgggagtcccggtcatgctgagcgcatttcaactggaaaacaatcgtttaacgcgtctggaagccgacgagatcaagcacctcgccagttcggtgtgggtcgatctggtcgagcctgacgacgatgaacgaagccgcgtgcaaacggaattgggccagaacctggcgacgcgcccggagctggaagacatcgaagcgtcagcgcgtttctttgaggatgaagacggcctgcatatccactcatttttcttttttgaagatgctgaggatcacgccggtaactctaccgtagcgtttactatccgcgaagggcgtctgttcaccctgcgcgaacgggagctgcccgctttccgcctgtatcgcatgcgcgcccgcagccagtcgatggtggacggcaacgcttacgagctgctgctggacctgttcgaaaccaaaatcgagcagctggcggatgaaattgaaaacatctatagcgacctggaaaagctcagccgggtgatcatggaaggtcgtcagggcgatgattacgacgaggcgctctcgacgctggcggagcaggaagatatcggctggaaagtccgcctgtgtctgatggatacccagcgcgcgctgaacttcctcgtgcgcaaagcccgccttccggccggtcagctggagcaggcgcgtgagatcctgcgcgacatcgaatccctgctgccgcacaacgaatcgctgttccagaaggttaacttcctgatgcaggcggcgatgggttttatcaacatcgagcagaaccgcatcatcaagatcttctcggtggtctccgtggtgttcctgccgccgacgctggtggcttccagctatggcatgaactttgagtttatgcctgaactgcactggagctttggctatcccggcgcgattgtctttatgatgctcgccggcctggcgccgtatctgtactttaagcgtaaaaactggctgtaaaaaaaggagcttcggctccttttttgcgtaccagcttggctttatgccctacgcgtacggcgtattgtgtaaaccgcatccatcacgaaaatcgccagcgccacccagataaaggcgaaggttaccattttatccgcgcccggcacttcgccgtagaaggttaccgccagcaggaacatcagcgtcgggccgatatactggaaaaatcccagcgtggagaggcgcagacgcgtcgccgcgccggtaaagcacagcagcgggatggtggtgaccacgcccgccgccatcagcagcaggttcagcgaccacggattctgccccatgtggctggtcgggctatcggcaataccaaacagataaatcgcagcgaccggcagcagccagagcgtctcaaacagcatcccggtttgcgcatccacggcgatctttttacgcagcaggccgtaaaaagcgaagctgaacgccaggcccagcgcgataatcggcagcgagccgaaggtccagagctgtaccagcacgccgcaggcggccagcagcaccgccagccactgcatccggcgaaagcgctccccgaggaagatcatccccagcagaatattcaccagcggattgataaaatagcccaggctggcttccagcatatgatggttattcaccgcccagataaacagcagccagttgccgcccaccagcaccgcagagagcgccagcaggaacacctttttcggcgttttcagcagccttttgacctgcggccactgacggctgatgctgatcagcgcgaccatgaaaaagaaggaccagatcacgcggtgagtcagaatttcatcggcgggaacatagtagataagcttgaagtacgccggcgcgataccccagataaaataggcggccagggccagaagaatccccacccgcgtttgtttagcgtccatcggtacaaatccattgccaaagagagagatgttactcgatttaggccgatcaacccaccatatacgtcgccgtggcgctggcgatatacacctgctcttcgttatgcagctcgacgcgggccaccgccactttattaccggcgcgcagcaggctgctggtagcggtaaagcgttccccgcggcccggacgcaggtagtcgacgcgcagatcgatagtgcccatccgcgacaggcgctggcgcagctcttcttcattgatggtgtcgtggcgagtcagcgtgctgccgacgcataccagccccgcagcgacgtccagcgctgaggcgatcacgccgccatgtaaaatgctctgcgcccagttgcccaccatcatcggctgattgttgaaactcagctgggcaaactccttttcatagcgctccagctccagccctaaggcacgattaaacggcatatggtagacgaagatctctcccaccagcttcagggcggcggcggcggtcagttcagacataacaacacttccataagttaatgaaatgttgattttatgcttctaaaatattgatttctactttaagaacggataacaggtcagatgccgcataaataggtagaatgctgcctgggttaaacagaaataataaatatccatccaggagaacagcaatgcgtatctctttggcctgcctgctggcgcttgttgcgcttccggccggcgttctggcgcaggacgcgccggtgaataaacaggtccacgacgctccggtcgttcgcgggagcattatcgccaacctgttacaggaccatgataatccgttcctgctctatccctacgagagcaactatctgctctatacgtggaccagcgatctcaataaagaagcgattcgtagctacgactgggccgaaaatgcgcgtaaagatgaagtgaagttccagctcagcctggcgtttccgctgtggcgagggatcctcggcgagaattcgctgctgggcgcttcttatacgcaaaaatcctggtggcagctctccaacagcaaagagtccgcgccgtttcgcgaaaccaactatgagccgcagctgttcctcgggtttgcgaccgattactcgttcgccggctggacgctgcgcgacgttgagatgggttataaccacgactctaacggccgttccgatcccacctcccgcagctggaaccgcctctatacccggctgatggcgcaaaacggcaactggctggttgaggtgaagccctggtacgtgattggcagcaccgacgataatccggatatcaccaaatatatggggtattaccggctgaaagtgggctatcagctgggcgacgccatcctcagcgcccaggggcaatataactggaataccggctacggcggcgccgagcttggggtgagctatccgatcaccaaacacgtgcgcgtctatactcaggtctatagcggttatggcgagtcgctcatcgattacaacttcaatcagacccgcgtcggcgtagggctgatgctcaacgatctgttttaatcgttgcactctggctctcaggcgctgaaaatagcgcctgttttcttttcaggcatatggggtcaacgtggcgcaggcggaagtattgaatcaggaatcgctggctaagcaggttttacaagagaccttcggctaccagcagtttcgcccgggccaggaaaccattatcgatacggcgttggccgggcgcgattgcctggtggtgatgccaaccggcggcggcaagtcgctgtgttatcaggttccggcgctggtgctgggcggtctcaccgtcgtggtgtcgccgcttatttccttgatgaaggaccaggtcgatcagctgctggctaacggcgtggcggcggcgtgtctgaattcaacccagagccgggagcagcagcaggaggtgatggctggctgccgcagcgggcagattcgcctgctgtatatcgccccggagcgcctgatgctggataacttccttgagcatcttacgcactggaatctgtcgatggtggcggtggacgaggcgcactgtatttcccagtgggggcacgatttccgtccggaatacgccgcgttagggcagctgcgccagcggataccgcaaatcccgtttatggcgctgaccgccaccgccgatgacacgacgcgtcgcgacattgttcgcctgctggatctaaacgacccgctcattcaggtcagcagcttcgaccgacccaacatccgctatatgctgatggagaagtttaagccgctggatcagctgatgcgctacgtgcaggaccagcgcggtaagtcgggtattatctactgcaatagccgctcaaaagtggaagacaccgccgctcgcctgcaaagccgcggcatcagcgccgcggcctatcacgccgggctggaaaaccatatccgcgccgacgtgcaggagaaattccagcgcgacgacctgcaaatcgtggtggcgacggtagccttcggtatgggtatcaacaaaccgaacgtccgttttgtggtgcatttcgatatcccccgcaatattgaatcctattaccaggagaccggccgcgccgggcgcgatgggctgcctgccgaggcgatgctgttttacgatccggcggatatggcgtggctccgacgctgccttgaggagaaacccgccgggccgctgcaggacattgaacgccataagctcaacgcgatgggggcctttgccgaagcgcaaacctgccgccgtctggtgctgctcaactactttggcgaggggcgccaggagccctgcggcaactgcgatatctgcctcgatccgccgaaacagtacgacggtttaatggacgcgcgtaaggcgctgtcgacgatttaccgcgtcaatcagcgctttggtatgggctacgtggtggaagtgctgcgcggcgccaataaccagcgtattcgcgatatggggcacgacaagctgccggtctacggcattgggcgcgaacagagccacgagcattgggtcagcgtgatccgtcagcttattcatttaggcctggttacgcagaatatagcccagcactctgcgctacagcttaccgaggccgcgcgtccggtcctgcgcggcgacgtgacgctacagcttgccgtgccgcgtattgtggcgctgaagccgaaagcgatgcagaaatcctttggcggtaattacgatcgcaagctgttcgccaagctgcgcaaactgcgtaaggcgattgccgacgaagagaatatcccgccctacgtggtgtttaacgatgcgacgctaattgaaatggccgagcaaacgccgctgacggccggggagatgctcagcgtcaacggcgttggcacgcgtaagctcgagcgttttggtaaagagtttatggccctgatccgcgcgcacgtggatggcgatgatgagtagtcagccagacgaaaaagtgtaaatatagttttcgtcctgactatttccctgcgagttaattatgttgacgctttttttcaccgtggcgctggtgcatatcattgcgctgatgagtcctggcccggacttcttctttgtttcacaaaccgccgttagccgctcccgcaaagaggcgatgatgggcgtgctggggatcacctgcggagtaatggtatgggcgggcgtagcgctgctcggcctgaacctgattatcgagaagatggcctggctgcataccattattatggtcggcggcggtctgtatctgtgctggatgggcttccagatgctgcgcggcgcgctgaaaaaaagcgaagcggcagcggcggtagagcctcaggtcgaactggcgcgcagcggccggagcttcctgaaagggctgctgaccaatctggctaacccaaaagcgattatctattttggctccgtgttctcgctgtttgtcggcgacagcgtcagttccggcgcgcgctgggggattttcctgctgattgttctggagacgctggcctggtttacggtggtcgccagcctgttcgccctaccgggcatgcgccgcggctatcagcggatggcgaagtggatcgacggcattgccggtactctgtttgccgggtttggtattcacctgattatttcgcgctaagcgttctgcggcccgcccaagggttatgggcgggccggatattaatgacgcagctgctgcaaatcgtcggacgtcagaccggtcatttccataaccgcagtagtatcaatgccccgctcgagcatggcctttgcgacgttaagaagcgcagcgcgtttaccctcttttatgccttccttaatgcccttctgcataccttcctcaagccacttttctgccagagtcatcagtacacctccatgttgcggcacccgctgtgccagctcatataatagcggccgaacatcctgctcttctcccccctgggccatatattttatcagtacggtaatttgctgtttatctatacatcaggcgtggcgcgcagaggccagcagggcgccgaccagcataaacagcgatccaaaaaccttgtttagcgctttcatctgtttcggccccttgatccacgcggcgatgcgctgcgccagcgtggcgtagccaatcatcacgataatatcgaccacgatggtggtgacgccgagcacgaggtactgcatcacctggggctggtgcggcacgataaactgcgggaagagcgcggcgaggaacacgatgctttttgggttggtcaggttgacgaacaccgcgcgcttaaagagtttgccgcggctctgcgcttgcgcaagggtattcagatcgagagaacccgcggctcgccactgctgaatgccgagccagataagataagcggcgcccgcccatttcaggatttcaaaggccaacagcgaacgggaaaaaagcgtacccaggccaacgcccaccagcacgatatgaatgccgagcccggtctgtagcccggcaatagaagccgccgcgccgcgataaccgtggttgattgaggtggtcatggtatttatcgccccggatcccggcgacaggctgagaataagagatgtcagcagataggcaaaccaccactcgaacgtcatgagaaactccctgattgtctgtttttatgccacaatacgctattgtgtaagcattgtgtgatgcacgataaaaaaacgattttcagcggttatcaggggtgtaagcccgatgtttttgcagcaaaaggactgggaaacacgagaaaacgcgtttgcggcctttaccatggggccactgaccgatttctggcgtcagcgggaagaggctgaatttacgggcgtggataacgttccggtgcgctttgttcgcttctgcgccaaaagtcatgaccgggtcgtggttatttgtccgggtcgcattgaaagctacgttaagtacgccgaactggcttacgatcttttccgcagcggttttgacgtgatgattatcgatcatcgcggccaggggcgctccggacgcatgctttcagatacccaccgcgggcacgtcgttaatttcagcgattacgttgacgatctcgccgcgttctggcagcagcaggtggcacccggacgctggcggaaacggtttatactggcccactccatgggcggcgctattgcgacgctatttttgcagcgctaccaccagcattgcgacgcgatggcgctctgtgcgccgatgttcggcatcgttatgcgcctgcctgactggatggtgcgccatattctcgattgggctgagggccatcagcgcattcgtgaagagtatgccctcggtaccggccgctggcgggcgctgccctttgcggttaacgtactgacgcacagccgtcaacgctatcgccgcaacctgcgcttttacgccgatgagccgcagctgcgggtcggcgggccgacgttccactgggtgcgcgaggggatcctcgccggcgaagaggtgctggccggtgcggagaaagacgtcacgccaacattattgctccaggcggaagaagagcgggtggtcgataaccgtatgcacgatcgctactgtgaacttcgcgccgctggcggtcatccctgtgaaggggataagccgtttgtcatagaaggggcataccatgagatcctttttgaaaaggacgcaatgcgctcggtcgcgctaaacgctatcgtcgatttttttggtcgacacacttaatccggcgaaacgctcgtcgccctgcttagaggttaaaatttttatgtaccaggttgttgcgtctgatttagatggcacgctgctttctcccgatcactgcttaactccctacgccaaagagacgctgaagctgcttaccgcacgcggtatcaacttcgtgttcgcgaccggccgccactacatcgatgttgggcaaattcgcgataatctcggcattaaatcctatatgatcacctcgaacggcgctcgcgtgcacgatagcgaagggaagcagatcttcgcccacaaccttgaccgcgatatcgccgccgacctgttcgaaatgatgcgtaacgatccggcgattgtgaccaacgtctatcgtgaagatgagtggtatatgaatcgccatcgtccggaagagatgcgcttcttcaaagaggcggtgtttaactacaagctgtacgagccgggcgagctggatcctgaagggatcagcaaagtctttttcacctgcgataatcatgagcatctgctgccgctggagcaggcgatcaacgcccgctggggcgatcgggtgaacgtgagcttctctaccgttacctgcctcgaagtgatggcgggcggcgtgtcgaaagggcatgcgctggaggccgtggcgaaaatgctcggctatagcctgaaagagtgtatcgccttcggcgacggtatgaacgatgcggaaatgctgtcaatggcgggcaagggctgcattatggccaacgcgcaccagcggctgaaagacctgcatcctgagctggaagtgatcggcagcaacgtcgatgacgccgttccccactacctgcgtaaactctatcttgactaaaaaagattgacgattgtttaattaataagcagtcgtcaacctgtcacttcgctacaatgcgtgttctttactctatgagacattcattgtggcgctactgattatcaccaccattctgtgggccttttcctttagcctgtatggcgaatacctggcaggccacgtcgacagctattttgcggtgctggcgcgcgttggcctggcggcgctggtgtttttgcccttcctgcgcacccgcgggcagagcctgtcaaccatcggcctgtatatgctggtgggggcgatgcagctcggcattatgtatatgctgagtttccaggcctatctgtacctgacggtatcggagcttctgctgtttaccgtcctgacgccgctctatatcacgctgatttacgatgtgatgagccgccgtcgcctgcgctggggctacgcctgtagcgcgctgctggcggtaatcggcgcgggcatcatccgttatgaccaggtgaccaaccatttctggaccggtttgatcctggttcaactctccaacatcagcttcgcgattggcatggtgggatataagcgcctgatggaaacgcgtccgatgccgcagcataacgccttcgcctggttctacatcggggcgtttctggtggcggcggttgcctggtcgatgctgggtaacgcgcagaaaatgccgcaaacttcgctacagtggggcatcctggcctttcttggcgtggcggcatccgggattggttactttatgtggaactacggcgccacccaggtggatgccggtacgctcggcatcatgaacaatatgcacgtgcctgccgggctgctggtgaacctggccatctggcagacgcagccccgctggccgagctttattattggcgctctggtgatcctggcctcgctatgggtccatcgacgttgggtcgctccgcactccgcacaaacggtaaatgatcgcaagcgtggttccgcgctgagcgaataaacgcctcggtaaccggctggcgctgctcgccgtcgcgcaccgcggcgtacagtcggctccacagtccctcgcccagggttttggtcaccaccaggccctggcgctcaaagctttccacgacccagtgcggcagggcggcgatgcccattcgcgccgccaccatctgaattaacaacagcgtattgtcgacgctcttcagctgcgggctaatcccggcaggctgcaggaagtgacgccagatatccagacgtgcgcgctggaccggataaatcagcagcatttcggtcgctaaatcctcgggcgcgatgcgcgcctttgtcgccagcggatgatccggcgccatcaccaggcgtacttcgaaatcaaacattggcgaatagtgcagtccgctgcgcggcaggatatcggaggtcatcaccagatccagctcgccctgctgcaggcccggctgtgggtcgaagatcaccccggactgaaagtccacctccacatgcggccagcgggcgcggaaactctccagcgccggcgtgagccactgaatacagctatggcattcgatggcgatacgcagccgggtttgctgcggctcattgcaatcctgcagggcgcggctgatttgcggcaggacctgattggccagctgcagcaggatctctccctgcggagtaaagcgcagcggctgacttttacgtacaaacagacggaagccgaggcgctgttccagatcgctgaactggtgggacaaggcggattgggtctggtgcagggccgccgccgcgcctgccagagagccgctattccgcaacgcctgtagcgttttcaggtgtttaatttcgatcatgaaagtccttcacttcggcatgaataatttgcgcttgaggaatatacagtaactgccaattatggatgtgtaaacatctggacgtctaaatcctttatctttcgaatttatggcagcgttggctgcacttcctcaccccagtcacttacttcagtaagctcctggggatgagcaagtttgccgccttccctaaatccgaaatctttcggattgcaattatgaggctcaaaaaatgacaattattaaccacaccctcggtttccctcgcgttggcctgcgccgcgagctgaagaaagcgcaagaaagctactgggcgggcaataccagccgcgaagaactgctggccgttggccgcgaactgcgcgctcgccactgggaacagcagaagcaggcgggcattgacctgctaccggtgggcgatttcgcctggtacgaccatgttctgaccaccagcctgtggcttggcaacgtgccggctcgtcatcagaacaaagacggctccgttgatattgataccctttttcgcataggccgcggccgcgcgccgaccggcgaaccggccgcggcggcggaaatgaccaaatggtttaacactaactaccactacatggtgccggaatttgtgaagggccaacggttcaaactgagctggacccagctgctggatgaggtggacgaagcgctggcgctgggccacaaggtgaagcctgttctgctggggccggtcacctacctgtggctcggtaaggtgaaaggcgagccgttcaaccgcctgagcctgctgaacgatattctgccggtttaccagcaggtgctgactgaactggcaaaacgcggcgttgagtgggtgcagattgatgaaccggcgctggtgctcgagctgccgcaggcgtggctggacgccttcaaaccggcttacgcggcccttagcggtcagcttaagctgctgctgactacctactttgaaggcattaccgataacctcgacaccatcaccgcactgccggtacagggcctgcatgtggatctggtccacggccaggacgatgtcgccgaactgcataagcgcctgcctgccgactggctgctctccgcggggctgatcaacggccgcaacgtctggcgcgccgatctgagcgagaaatacgcgcaggttaaagatatcgtcggcaaacgtgaactgtgggtagcctcttcctgctccctgctgcacagcccgatcgatctgaacgtggaaacgcggctcgatgccgaagtgaagagctggtttgccttcgccctgcaaaaatgccgggagctggcgctgctgcgcgatgcgctgaacagcggcgacaccgcggcgattgctgactggagcgcgccgatccaggcacgtcgccagtcaacccgcgtgcacaacgctgcggtagagaagcgtctggcggccattaccgctcaggacagccagcgtcaaagcgtctacgaagttcgcgccgaagcgcagcgcgcccgctttaagctgccggcctggccaaccaccaccatcggctccttcccccagaccaccgagatccgcggcctgcgtctggacttcaaaaagggcaatctcgatgctaaccgctaccgcaccggcatcgccgaacacattaagcaggcgatcgttgagcaggagcgactggggctggacgtgctggtacacggtgaagccgagcgtaacgatatggtggaatacttcggcgaacacctggacggctttattttcacgcagaacggctgggtacagagctacggctcccgctgcgtcaaaccgccggtggtcgtcggagatatcagccgcccggaggcgatcaccgtcgagtgggcaaaatacgctcagtccctgaccgacaaaccggtaaaaggcatgctgaccggcccggtgaccattctttgctggtccttcccgcgtgaggacgtcagccgtgaaacgattgcgaaacagatagccctcgcgctgcgcgatgaagtggcggatctggaagccgccggtatcggtatcatccagatcgacgaaccggccctgcgggaaggcctgccgctgaagcgtagcgactgggatgcgtatctggcatggggggtggaagctttccgtatcaatgctgcggtggcgaaagacgacacgcagatccacacccatatgtgctattgcgagttcaacgacatcatggattccatcgccgcgctggatgcggacgtgattaccatcgaaacctcgcgctctgatatggagctgctggagtcgttcgaagcgttcgactacccgaatgaaatcgggccgggcgtgtacgacattcactccccgaacgtgccgagcgtggagtggattgaagcgctgctggaaaaagccgcgcagcgtatcccggcagagcgcctgtgggtgaacccggactgcggcctgaaaacccgcggctggacggaaacgcgcgccgcgctggccaacatggtcaaggccgcgcaaaacctgcgccaggcgtaatataaatcacacttgtgggaggccccggcctccttttttggtttcttctcttcgctggcaaaaccgaatgtgaagaactgttcggcgtgaggcggcagcgtctggacaacgtccacccgctcccggctgttgctcaggacggatgtctttgactacagttaagcgttccctgaaccgaagctgtgataactctcctgaggtgaaagatgattgaacaccacgatcaaaaagggtatttgcgttttgccattaatctgggtaatccggtgcttacgacactgctgccggatggctctccggggggggattaccgtcgagctggcaaagaaactggctgcagagagccagcgcgaagcgcggtttgtgacctggccgacggccgggcaggtagttgacgcggcgctgcaggatcaatgggatatcgcctttctggctatcgacccggcgcgggaagataagcttcgctttacgccatcctacgtcactatcgaaagctcgctgatggtgaaaaaagagagccagattcaatcggttcaggagatggaccgcgcaggcgtggtgattaacgtgggcaaaggcgcggcctacgagctgtatctgattcgcacgctgcagcatgcaacgatgcgccagtacgccacctcacaggaggctattcaggcatttatcaacggcgaaggcgattgggtggccggtattcgccagcctctggagaaagccgcgcaggagaatccgcagtttcgcgttctgcccgacagctttagccagatacaccaggcgatatgcgtaccgcgcaatgcgacgcagcactatgaatttatttgccgccgcctctcttcctggatagcggacggtactattgccgggatggtgagccgccatatcggcaatagctgatcgttaaccgcgcttaccgccatactgcgcaaaccaggccagcatccgctgccagccgtcttttgccgactcttcatgatagctggcgcgatagtcggcattaaaagcgtggtcggcgtgcgggtaaaccacgatttccgccgtggcgttggccgcccgcagcgcctgacgcatcgtttccaccgtgtcctgcgggatgctgtcatctttcgcgccataaagccctaacaccggcgcgttaagatcgacggcaatatcgaccggatgcttcggcgaattcagcgttttctcgcctaccagcttgccgtaccaggcgacggcggcttttaactgcggattatgcgcagcgtacagccaggtaatacgcccgccccagcagaagccggtaatcagcaagcgatgagcatcgccgccgtggcggtaggcccagctggccacgtgatcgaggtcggccagcacctgagaatccggcacctttttgaccagtccctggaacagagaagggatgtcgctgtaatcattaggatcgccctggcggaaatagagctccggtgcgatagccagatacccctcctttgccagacggcggcagatatcgcggatatgttcatgcacgccgaaaatttcctggaccacgataacgaccggcagcggaccgtcgacgccgcgcgggcgagcatggaacgccggcatgttatctccctgtgaagggatggatgtctccccggagacgatgttctcatctgatgtgtgaacggcagttgaggcgtgcggcgtggctgcaggtgcaaagccggtttgcttaattgtcgtcatggtattctccgtaccctcaatttattagcgcatcaataactatagctgctctggacaggacgttaatcaaacacagtgcccgaaacaggctatcttttgttcaggcttctgcgatttagcttgttaatgtgatgtatatcactcttttatggaaagttattgcaatgaatttcattcatggtgattgtggtcacaaaattgagccgacagcttctgtaaagtaccgttttgcttctgctgataattcgacccacagaggagttttttatgtccaagtctgatgtttttcatctcggcctcaccaaaaacgatttacaaggggctacgctggctatcgtccctggcgatccggagcgtgtggaaaagatcgccgcgctgatggataagccggttaagctggcatctcaccgtgaattcaccacctggcgcgctgagctggatggtaaagcagtgattgtctgctctaccggtatcggcggcccatcgacctctatcgccgtggaagagctggcccaactgggcatccgtaccttcctgcgcatcggtaccaccggcgccattcagccgcatattaatgtcggcgacgttctggtgacgaccgcgtccgtccgtctggacggcgcaagcctgcactttgcgccaatggagttcccggcggtggctgactttgaatgtactaccgcgctggttgaagcggcgaagtctatcggcgcgaccacccatatcggtgtcaccgcctcttccgacaccttctatccgggccaggaacgttacgataccttctccggccgcgttgttagccgttttaaaggctcgatggaagagtggcaggcgatgggcgtgatgaactatgaaatggaatccgccacgctgctgacgatgtgcgccagccagggcttgcgcgccgggatggttgccggagttatcgtcaaccgtacccagcaggaaattccgaacgcggaaaccatgaagcaaaccgaaagccacgcggtgaaaattgtcgtggaagcggcgcgccgcctgctgtagttaccctttcttctgccaggggtcggactctccggcccttcttttttgcgtagcgcctcgcaggaaaaccctttcaaactggacgtttgtacagcacaattctattttgtgccgtaagtcgttgccgcagggggctttgtggatatctcaattattattagcgccgttgtggcgctggccgtcgggctgattgtcggctggctggcgaccaaagcgcacgccgatcaaattcgcgccgatcttatcgatgagcggcgcgagctggatattgagctgagcgcggcccgccaatgtctggtgcaggagtcacactggcgagaagagtgtgaactgctcaataacgaactgcgcagcctgcgcgatatcaacgcctcgctggaagccgatcttcgcgaagtgaccacccgacttgaatccactcagctgcatgcggaagacaaaattcgccagatggttaacagcgagcagcgtcttagcgaacagtttgagaatctggcaaatcgcatttttgagcacagcaaccggcgggtggatgagcagaatcgccagagcctgcacggcctgctgacgccgcttcgcgaacagctggatggctttcgtcggcaggtgcaggatagctttggccaggaagcgcgggagcgccatactctggcccatgaaatccgcaatcttcagcagctgaatgcgcaaatggcccaggaggcgctaaacctgacgcgcgcgctcaaaggcgataacaaaacccagggcaactggggcgaggtggtgttgacccgcgtgctggaagcgtccggactgcgggaaggatatgaatatcagacccaggtcagcatcgaaacggacaatcgcgcgcggatgcagcccgatgtgattgtccgtttaccgcaggggaaagacgtggtgatcgatgccaagatgaccctggtggcctatgagcgctatttcaacgccgaagatgattacacccgtgaagcggcgctgcaggagcatatcgcttcggtacgcaaccatatgcgcctgctggggcgtaaagactaccagcagctgccggggctgcgttcgctcgactacgttctgatgtttatcccggtagaacccgccttcctgctggctatcgatcgtcagccggaactcattagcgaagcgctgaagaacaacatcatgctggtgagcccaaccacgctgctggtggcgctgcggactatcgccaatctttggcgctatgagcatcagagccgtaacgcgcagaaaattgccgaaagagcggggcggctgtatgacaagatgcgcctgtttgtcgatgatatgtccgccatcgggcagggcctggataaagctcaggataactaccgccaggcgatgaaaaagctcgcctccggacgaggtaacctgctggtacaggcggaatcattccgtgagctgggcgtggaggttaagcgtgagattaatcctgagttagttgaacaggcgacggcccaggatgaagaataccgccttgcgcaggggggtaacccgccgggagataacgatattttatccgatcctacggctactgccatgtttgggggcggctcccggccacgttgaagcgtatgggaagtgcgctaaacctgttacactcaacgaacattttcttgataagcaagcaggcattgagatggttgaggattcacaagaaacgacgcattttggctttcagactgtcgccaaagagcagaaagctgacatggtggcgcatgtatttcattctgtggccgcaaaatatgacgtaatgaacgacctgatgtcgttcggtattcatcgtttgtggaagcgtttcaccatcgactgcagcggcgtccgccgcgggcaaaccgtattggatctggctggtggtaccggcgatctgacggcgaaattctctcgcctggtgggtgaaaccggccgcgtgatgctggcggacatcaacgactctatgctgaaaatgggccgcgaaaagctgcgtaacattggtattgtcggcaacgtggaatacgtccaggcaaacgctgaagcgctgccttttgcagacaacacctttgattgcattacgatttctttcggtctgcgtaacgtgaccgacaaagaaaaagcgctccgctcaatgtatcgcgtattaaagccgggcggccgcctgctggtgctggaattctcaaaaccgattattgagccgctcagtaaagcctacgacgcctattccttccatatcctgccgcgcgtgggtgagctggttgctaaagatgccgaaagctatcgttatcttgctgaatctattcgaatgcatcccgatcaggacacgctgaaaggcatgatgcaggacgcagggtttgaaagcgtcgactactacaacctgacggcaggtatcgttgcgctacaccgcggatataagttctgacaggagggacgctatgcctttcaaaccactggttaccgccggtcttgagacggtccttaacaccttcctctggcgcgatcgggcgctgaaacccgcgcgccagcgcctgctggggaaagtgctgcgcatcgagctgcaagagctttccgatcctgtggtgctggtttttagcgaacgtcagctggacgtgctgggcgcgtgggaaggtgaggctgactgcaccgtacgaacccgccttagcgtgcttccgcaattgcgcaatcgccagcagcttaccgcgctgattcgcagcggcgatcttgaggtgcagggcgacctgcaggtggtgcaaaataccgtcacgctgtgcgatctggcagagttcgatccggctgaactgctcgccccgtataccggtgatgtggttgcggaaggctttagtaaagtattccgcggcggcgctcgctttcttctgcatggcgctcaacgccagcagcgctatgtcgcggaagcgattaccgaagagtggcgcctggcgccggggccgctggagctggcctggtttgcagaggaaaccgctgcggtagaacgaaccctggccgcgctggaaaaacggctggacacgctggagggcaaatgacgccaggagaattacggcgcctgtattttatcgtccacacctttttgagctacgggcttgatgagctcattcccaaaatgcgtatcacgctgccgctgcgaatctggcggcggatgctgttctggatgcccaaccgccataaagatcgtcctcttggcgagcgactccgcctcgcattacaggagctggggccggtgtggatcaagtttggccagatgctctcgacccgtcgcgacctgtttccgccgcacattgccgatcagctggccatgctgcaggatcgcgtcgcgccctttgacggtctgcaggccaaaaagcagattgagcaagccatgggcggcctgccggtagaagcctggtttgatgacttctctgttgaaccgctcgcttccgcttctattgcccaggtgcataccgcgcgtctgaaagagaacggcaaagaggtggtcattaaggtgatccgcccggatatcgtgccggttatcaaagcggatatgaagcttatctaccgtcttgcccgctgggtgccgcgtctgttaccggacggccgtcgccttcgcccgcaggaagtggttcgcgaatatgaaaaaacgctgctggatgagctcaacctgctgcgtgaatcggctaacgctatccagcttcgccgcaacttcgacgagagcccaatgctttatgtcccggaagtttattcggactactgtagcgaaggcatgatggtgatggagcggatttacgggatcccggtgtccgacgtcgccgcgctggaagcgcagggaactaacatgaagctgctggccgagcgtggcgtgcaggtcttctttacgcaggttttccgcgacagcttcttccatgccgacatgcatccgggcaatatttttgtcagccgtaatcatccggaagatcctcagtacattggtattgactgcggtatcgtcggttcgctgaacaaagaagataagcgctatctggcggagaacttcattgccttcttcaaccgcgattatcgcaaagttgcggagctgcacgttgattccggctgggttcccgcggataccaacgtcgaagagttcgagtttgctattcgtaccgtctgcgagcctatctttgaaaaaccgctggcggaaatctcgtttggccacgtgttgttgaacctgtttaatacggcgcgacgtttcaatatggaagtgcagccgcagctggttctgctgcagaagacattactttacgtagaaggtgtaggtcgccagctctatcctcagttagacttgtggaaaacggcgaaaccgttccttgaatcgtggatcaaagatcaggtgggcattccggctctggtgcgggcgtttaaagaaaaagcgccgttctggatcgaaagaatgccggaaatacctgagctggtttaccagagcctgcagcaaagcaagcagctgcagaatagcgtcgataccatcgtgcgcgacatccaggtgcggcacgtgcgccagggtcagtcccgctatttgttcggtataggcgcggttttattactgagtggtacgctgctattcattcatcgtcccgagtggggcatgatgccaggctggctgatggccgctggggtcgtaacctggcttatcggctggcgaaagacgaactgacggcggccgcctttatcactgcgcataatgtgtataatgcgtcctaataattcatcatctgtcataggggaatgtgtatgggtggtatcagtatttggcagttactcattgttgtcgtcatcgtggttctgctttttgggacaaaaaagctgagctcgctcggttcagatttaggggcgtcgatcaaaggctttaaaaaggccatgagcgacgaagagaaaccggaaaaatccgcgccggatgcagatttcgcggcgaagacccttgctggtaagccggatgatgcaaagaaagacgagactaaacgccacgacaaagagcaggtgtaattcgtgttcgatatcggttttagtgagctgctgctggtattcgtgattggcctcatcgttctggggccacagcgactaccggtagcggtaaagacggtggtgagctggatccgcacgctgcggtcgcttgcggctaccgtacaaaatgaaattacccaggaattaaaactgcaggagtttcaggaaagccttaaaaaggtggaaaaggccagcctggacaacctgacgcccgagctaaaagcttcaatggatgaactgcgtgaagcggctgaatctatgaagcgatcctactccgcccacgatcctgaaaaagccagcgacgaagccaataccattcacaacccggtcgtaaaagggagtgaagagcagcgcaaggacgtgacgccagcgacggctgaacatcaggccagtgcgccagagcatgcgcctgactccgtgtctgaagaactccccgcttcgcagagtgaaatcccggcagcgaaagtgaaagctgccgtgtcggcttccgattcctcctcccctgtaccgagtgataaacagtaaaaatgggcgtagacgatactcaaccgctaattacgcatctgattgagctgcgcaagcgcttgatcaacagcattcttgcgattctggtgattttcctggcgttagtctatttcgccaacgatatctatcagctggtttccgcgccgctgattcggcagatgccggtcggtgcgaccatgatcgccacggatgtggcctcgcctttcttcacgccgatcaagctgacctttatggtatcgataattttgtcggtcccggtcattttgtatcaggtctgggcctttgtggcgccagcgctgtataagcatgaacgtcggctggttatgccgctgctggtctccagtacgctgctgttctatatcggcatggcctttgcctacttcgtcgttttcccgctggcgtttggttttctgacccacgcggcgccggaaggcgtacaggtctctaccgatattcgcagctacctcgactttgtgatggcgctgtttatcgcctttggcgtctcattcgaggttccggtggccatcgtcctgctgtgctggatgggcgtcaccacgccggacgacctgcgtaagaaacgcccctacgtactggttggcgcattcgttgtcgggatgctgctgaccccgccggacgtgttctcgcaaaccctgctggcgattccgatgtactgtttgtttgaggtcggggtcttcttcgcgcggttctacaccggtaaacgcctgacgcgtgatgaggatgccgctgccgaagaggcgcagggcaaagaagaataacgctcaaccgcccgccagggcggttgccgtatgggagcgatgatgtttgatatcggcgtaaatctgaccagttcgcagttttcccgcgatcgcgacgaggtggtttcccgggcccggggggcgggcgtcagcgggatgctattgacgggaaccaacctgcatgaaagcgcgcaggctcagcagctggcgcgccgttattccgggtgctggtcaacggccggcgttcatccccacgacagtcgcagctggacggactcggcggcggcagcggtctatgcgctggctcgcgagccggaagtcgttgcggtgggtgagtgcgggctggatttcaaccgcaatttttcgacgcctcaggagcaagaagcggcgtttagcgctcagctggcgctggccgcggagctgtcgatgccggtatttctgcactgccgcgatgcgcacgagcgcttcctggccctgctggtgccctggcttgataagctcccgggggccgttgtgcattgttttaccggtagccgcgaagagatgcgcgaatgcgtggagcacggtttatttattggtatcaccggctgggtatgcgatgagcgtcgggggctggagctgcgagagctgctggtcgatattccggcagagcgcctgctgattgagaccgatgcgccgtacctgttgccgcgagatatgctgccaaaacccgcttctcgccgcaatgagcccgcctacctgccgcatattctgacccgcatcgcgcaatggcgtggggaggaggcgcaatggctggaagacgtgactgatgctaacgtcagaagactttttggcgtggctttttaagcgccgtcagattttataaaagtcagtatttttaacgctctggagcacctgcttgttaagcagattcagcagcagcatcgagcgggcttcgccgtccggttcggtaaaaatagcctgcagaccttcaaaggcgccatcggtgatcagcacgctgtcgccttcatgcggcgtttcaggatcggtgatgccttccggtttgtagatggaaagctgatgaatgacggcagatggcacgatagcgggcagcgcgccgaaacgcacaaaactgttcacgccgcgcgtggcgctgatggtagtggtatgaatcacttccgggtcgaactcgataaacagataatttgggaacaggggttcgctgaccgtcgtgcgtttaccgcggacgattttttccagctcgatcgttggcatcaggcaattgacggcctgccgttcaaggtgttcttgggctcgttcaagctgcccacgtttgcaataaagtaagtaccaggcttgcataatgactctttccaatgctactagctgcaagcataacaaaagcccggtacgatcgcgaaatcattgcgggtgaaaactaaatttcagcgttctttcacgctaatttaacaaaaatacagcatagctccggcgaacgccgtataatcacccgcctgtatagaggtcaataacaactccatgaaataccacgatctacgcgaatttctgacattactggagcagcagggggaattgaaacggatctccctgccggtcgatcctcacctggaaatcaccgaaattgccgaccgcactttgcgagctggcggtccggcgctgctattcgaaaatcccaagggctacgccatgccggtgctgtgtaatcttttcggcacgccgcggcgagtcgcgctggggatggggcaggaggatgtcagttctctgcgggaagtgggtaagcttctggcattcctgaaagagccggaacccccaaaaggtttccgcgatctgtttgataagctgccgcagttcaaacaggtgctgaatatgccgactaagcgtctgcgcggagcgccgtgccagcagaaaatcattcagggtgatgaagttgatttgacccgtatcccgatcatgacctgctggccggaagatgccgcgccgctgatcacctggggtctgacggtgacccgcggcccgcataaagagcggcagaatctgggcatttatcgccagcagctgattggcaagaacaagctgattatgcgctggctatcgcatcgcggcggcgcgctggacttccaggagtggtgcgcggcgcgtcctggcgagcgtttcccggtctccgtcgcgctgggcgccgatccggcaaccattctcggggcggtgactccggttccggataccctttccgaatatgcttttgccgggctactgcgcggcaccaaaaccgaagtcgtgaagtgcatctctaacgatcttgaggtgcccgccagcgcggagatcgtactggaagggtatattgaagccggagaaatggcgccggaaggcccctatggcgaccatactggctactacaatgaagtggataacttcccggtctttaccgttacccacattactcagcgtgaagatgccatctatcactcgacctataccgggcgtccgccggatgagccggcggtactgggcgttgcgctgaacgaagtgttcgtccccattctgcaaaagcagtttcctgaaatcgtggatttctatttgccgcctgaaggctgttcctatcgcctggcggtcgtcacgatgaagaagcagtacgccggacacgcgaaacgcgtcatgatgggcgtctggtcgttcctccgccagttcatgtacaccaagttcgttattgtctgcgatgacgatgtcaacgcgcgcgactggaatgatgtgatttgggcgattactacccgtatggacccggcgcgtgatacggtactggtagaaaatacgccaattgattatctggattttgcctcaccggtttccggtttgggttcaaaaatggggctggatgccacaaataaatggcctggagagacccagcgcgagtggggtcgtccgatcaagaaagatcctgaggtgacggcgcgcgtcgacgccatctgggatgaactggctatcttcaaataacagtaagcggggctacgccgctgttttgcacaatagacccgacagaggggacgcatgacaaccttaagctgtaaagtgacctcagtggaggcgattaccgatactgtgtatcgcgttcgattagtgccggaagcggcgttttccttccgtgccggtcagtatctgatggtcgtgatggacgaacgcgataagcgcccattctcgatggcctccacgccgtcggaacaggagtttatcgagctgcatatcggtgcatctgaactgaacctgtatgcgatggcggtgatggatcgaatcctgaaagagcgtcaaatcgaggtcgatatgccgcatggcgaagcctggctgcgcgatgatgaagaacgtcctctgattttaatcgccgggggaacgggcttctcttacgtgcgttcgattctgctcaccgcgctggcgcgcaatccgaatcgcgatatcgccatctactggggcgggcgcgaagcgaaacatctctatgacctggccgagcttgaagcgttaagcctgcagcatccgggcctgcgcgtcgaacccgttgttgagcagcctgacgccgagtggcgtggccgtaccggaaccgtactcacggcggttctgcaggattacggtacgctgggagagcatgatatctatatcgctggccgcttcgagatggcgaaaattgcccgcgacctgttctgcaacgagcgcggcgcgcgcgaagatcgcctgtttggcgatgcctttgcgtttatctgatagccgctctgccagcatccgggcttttggcccggatgctgttgttaccgggcatcgctgaagtaaacgtacagcggtcgttcgttttccagcaaacagagcattttccctaccgggttcccttctttttccagcgtggcggttagctgcgtcgcgatatgctggctgcctatcttctcatcatagcgttcggtagtgatatcggtgacggtcagatccttgaaccgctcgctttgcggatcctgcgccattttaccgatcccccatgagaggcaggcctgagcgttatcctgttcgctggcgagcgctgcggcagggaacgtcgttagcaaaaaaatgatggggattattttcatgactcttcattatccttaatgagcgtgacgtatccggtgataataaccgaatagcggaaataaaaaacccgcccctgacaggcgggaagaacggcaactaaaccttctcccgttatcattcacgctgcctctttgttggctgccctcgctcaccccggtcaccgggttctctatgctcccggggatttgctcggctgccgccgcgatgccgcgcgaatgattcaggggattaacgctttgcttaaacccgctcgaataccgtcgcgataccctgacctaaaccaatacacatcgtcgccaggccgaactgtgcgtctttgcgctccatctgattgatcaatgtggtgctaatgcgcgcgccggaacagccgagcggatgacccagggcgatcgcgccgccgttgaggttgatcttctcgtcgatctgttccatcagccccagatctttaatgcacggcaggatctgcgcggcaaaagcttcgttcatttcgaacacatcgatatcgctggtggagagcccggcttttttcagcgccagttttgacgcgggaaccggaccatagcccattattgacgggtcgcagccaacgacagccatcgaacgcacgcgagcgcggggcttcaggcccagctcgcgggcgcggctttcgctcattaacagcatggctgcggcgccatcggagagggcggatgaggttcccgccgtcacggttccggttaccggatcgaaagcgggtctaagcgcggccagcgcttcaaccgttgtctccgggcgaatcacttcgtcatagctgtaagacttcagcacgccgtcggcgtcgtgaccgcctgtcgggacaatttccgctttgaatgcgccggattgcgtcgcggcccaggcgcgggcgtgggagcgagccgcaaactggtcctgcatctcgcggctgatgccgtgcaggcgcgccagcatttctgccgtcagccccatcattccggcggctttggcgacgttacggctcaggcccggatggaaatctacgccgtggctcatcgggacgtggcccatatgctctacgccgccaatcaggcatacgctggcgtcgccggtcatgatcatgcgtgccgcgtcgtgaagcgcctgcatggaagaaccgcacagccgattgaccgtggtggcgggtaccgaatgcgggatttccgccagcagcgccgcgttgcgggcaatattgaagccctgttccagcgtctgctgaacgcagccccagtaaatatcgtcaatcgtgctggcttcaagggatgggttgcgtgaaagcaggctacgcatcaggtgcgcggagagatcttccgcgcgcacgtggcgaaaggcgccacccttcgaacggcccatcggggtacgaactgcatcgacaatgacaacctgttccattgtgactccttaagcctttttcaggtcgcctggcgcacgggcaggctcaactggtggatagtacggttcgttatgacgcgctttgctgcgcaatccttccggcacgtcgtatagcgggccgagatgctgatactgctgggccatatcgagatattttgcgctaccgagcgtatccagccagcggaacgcgccgccgtggaacggagggaagcccaggccataaaccagcgccatatcggcttctgccgggctggcgataatgccctcttcgagacagcgcaccacttcattaaccatggggatcatcatccgggcgataatctcttcatcgctgaaatcacgcttcggctggctaacttccgccagcaggctatcgactgcggcatcctcttccttcttcggtttacctttactgtcttctttgtagcgccagaagccgaggccatttttctggccgaaacggttagcgtcgaacagcgcatcgatcgcatcgcgataatctttctgcatccgctgcgggaagcccgccgccatgaccgcctgcgcgtgatgcgcggtatcaatgccaacgacgtccagcagataggccgggcccatcggccagccaaactgcttctccatcactttatcgactttgcggaagtccgcgccgtcgcgcagcagctggctgaaaccggcgaagtaggggaacagcacgcggttaacaaagaaaccggggcagtcgttgaccacaatcggcgttttgcccattttgctggcccaggcgaccattttcgcaatggtttcgtccgagcttttttcgccgcgaacgatctcgaccagcggcatccggtgcaccgggttaaagaagtgcataccacagaagttttccgggcgcttcagtacgctggccaactcgctgatgggaatggtggaggtattcgaagccagcacggtatccgggcggactttgtcttccgtttccgccagcaccgcttttttcactttcggattctcaacaacggcttcgaccacgacgtccacgcgttcaaagccggcgtaatccagggttggctgaatagtagaaatgacgccagccatcttgagaccgtcgattttgccgcgctcaagctgtttattcagcagcttggccgcttcggtcatgcccagcgtcagcgatttgtcgttgatatctttcatgaccaccggcacgcctttccaggctgactggtatgcaatgccgccgcccataatccccgcgcccagcacggccgcgtgttttggcgtgtcgatatctttcgtcagcttcttcgcttttgctttgacgtactgatcgttaaggaagatacctaccagcgcacgcgcctcgttggtatgcgccagcgggacgaaacttttattttccagatccagcgcttcttcgcggccaaagcgggcggcggcttcgatggttttaacggcggtaatcggggccgggtagtgcttcccggcggtttgcgccaccatgcctttggcgatggtaaaactcatcgcggcttcaattttactcagatgcagcggctccagcttcggctggcgcttcgccttccagtccaggtcgcctttaatagcctgacgcagaatcgcgaccgcgccatcgatcagtttttcatgcttaaccacgccatcgacgaggccgatttttaaggcctgttcggcgccaacgtctttgccggcggcaatgatttccagcgcgctgtccgcgccaagcatccgcggcatccgcaccgagccgccaaagcccggcatgatgcccagcttcgtttccggcagaccaatgcgcagatccggcgtcgccaggcgataatcggtcgccagcacgcattcgcagccgccgcccaacgcatagccgttgacggcggaaatggtcggaaccggcaaatcttccaggcgattaaagacgctattagcgaaatgcagccactggctgagctgttcttcgggaaccaggaacagagaaagaaattcggtgatatccgcgccgacaataaaagcggctttctcggagcgtagcagcagcccttgcagatctttttgtttttcgagtacgtccagcgcttcaccgaggctggctacggttgcggtatcgagcttgttgaccgagccgggggcatcaaataccagttcggcaatgccgtcttcccgccagtcgaggtacagggtgtcgcctttgtagagcatgtcagtctcctgaatccagcaatatgatctggtcgtaccagatgagacggagtgtggattttatgttaagaaattgcaaataagactttaaataaatgctggtcggatcacacccggcagagatcaccccgtttgaggtcattgtgctaagatgcgaagcatcacgatctcataaaatcaaaggataaatgatggaatcccttgccggtctctataaaaatcatatcgttaccttacaagaacgcacccgcgatgttctggcccgctttaagctggatgccctgctgatccactccggtgaactggtcaacgtcttccttgacgatcatccgtatccgttcaaggtcaatccccagttcaaagcctgggtgccggttacgcaggtccctaactgctggctgctggtggacggcgtcaataaacccaaactgtggttctatctgccggtcgactactggcataacgtggaaccgctgccgacctcattctggaccgaagaggtggatgtgattgccctgccgaaagcggatggtatcggcagccagctgcccgccgcgcgcggcaatattgcctatatcgggccggtgccggaacgtgcgttggggttagatatcgcggcggataaaatcaacccgaaaggggcgatcgattatctgcactactatcgctcttataaaactgactatgagctggcctgcatgcgcgaagcgcagaagtcggcggttaacggtcatcaggccgctcatgaagcgttcctttccgggatgagcgagtttgatatcaaccaggcctatctgaccgcgaccggccatcgcgacaccgatgtaccgtacagcaacattgtggctctgaacgaacatgcctccgtgctgcattacacgaagctggatcatcgcgcgccggcggaattgcgcagcttcctgctggatgcgggcgcggaatataacggctatgcggcggatctgacgcgtacctgggcggcgcatggcgatagtgactatgctcaactgattaaagacgttaatgaggaacagctggcgctgattagcaccatgaaggcgggcgtgagctacgtggattatcatgtccagttccatcagcgtattgccaaactgctgcgcaaacatcagatagtcaaagatatgagcgaagaagcaatggtggaaaacgacctgaccggaccgtttatgccgcacggcattggtcatcctttaggtctgcaggttcatgatgtcgcgggttttatgcaggatgattcgggtacccatctggccgcgccggcaaaatatccttacctgcgctgcacgcgcgtactgcagccgcggatggtattgacgattgaaccgggaatctactttattgaatcgctgctggcgccgtggcgcgaagggcagttcagcaaacacttcaactggcagaaaattgaagcgctgaaaccgtttggcggtattcgtattgaagacaacgtcgtgatccacgaaaacagtattgaaaacatgacgcgcgatctgaaactggcgtaatggaaagctggttgataccggccgcgccggccacctttgtggaagagatcaaaaagagccgctttatcacgctgttggcgcacaccgacggcgtagcggcggcaaaggcgtttgtcgagtcagtcagggcggatcacccggatgcccgtcaccactgcgtggcgtgggtcgccgggcctccgaatgactcgcagcagctggggttttccgacgatggcgaaccggcggggacggcgggtaaaccgatgctggcgcagctgatgggtagcggcgtcggcgagataaccgctgtcgtcgtgcgctactacggtggtattctgctgggcaccggcggcctggtcaaagcgtacggcggcggtgtgcaccaggcgcttgcgctgctgacaacacagcgcaagacgccgctgaccgcgtatactttgcagtgtgaatacgggcagttggccgggattgaaacgctgttggctcagttctcagggaaaattgtcgaaagcgaatatcaagcgtctgttcagctgcgcgtggcgcttcctcaggctgaagtggcgctattttcagcaaaactggctgattttagtcgcggttcgttgcaattactgaagattgacgaataatccccacctgatttttttgcatatcaaaggaagcgccagagatgcattttcgcgcgataacccgaatcgttggactgctggtcattttgttttcggggacaatgatcctcccgggattaatagccctgatatatcgcgatggtgcggggcgggcgtttacccagacctttttcgttgccctggcgatcggttcgctgctgtggtggcccaaccgtcgtgagaagggtgaactgaaatcccgcgaagggtttctcatcgtcgtgctgttctggacggtgctcggaagcgtcggttcgctgccctttatcttctctgaacagcccaacctgagcattacggatgccttctttgaatccttctcgggtctgacaacgaccggggcaaccacgctggttgggttagattcgttaccccacgccattcttttctatcgtcagatgctgcaatggtttggcgggatggggatcatcgtgctggcggtagcgatactgccgatactgggcgtcggggggatgcagctgtatcgggcggaaatgcccgggccgctgaaagataacaagatgcggccgcgcattgctgagacggcgaaaacgctgtggcttatctatgtcttactgacggtggcctgtgcgctggcgctgtggtttgccggcatgccggcgttcgacgccatcgggcacagcttctcgacgattgcgattggcggattctccacccatgacgccagcgtgggctactttaatagcccaacgattaactccattattgcgattttcttgctgatatcgggctgtaactacggcctgcacttttcattactcagcgggcgcagcctgaaagtgtactggcgcgatcccgaattccgcatgttcatcggcgtgcagctcacgctggtggtggtatgtaccctggtgctgtggctgcatgacgtctacagttcggcgctcatgacggtgaatcaggcgttctttcaggttgtatcgatggcgacaacggcgggcttcacgaccgacagcattgcgcgctggccgctatttttaccggtcctcctcctctgttcggcttttatcggcggctgtgccgggtcgactggcggtggtttgaaggttatccgtattcttctgcttttcaagcagggtaaccgtgagcttaaacggcttgtacatcctaacgcggtatatagtattaaactggggaaccgcgcgctgccggaacgtatcctggaagccgtctggggattcttctccgcctatgcgctggtgtttatcattagtatgctggcgattatcgccaccggcgtggatgatttctcggcctttgcttcggtcgttgcgacgctgaataaccttggcccagggctgggcgtggtggcggataactttgcgacgatgaaccctgtcgcaaaatggatcttgattgctaatatgctgtttggtcgtctggaagtgttcaccttgctggtgctatttactccgactttctggcgcgaataacaggagtgcctgtgaaaactttgattctcttttctacccgcgacggacagacgcgtgaaatcgcctcctatctggcatctgaattaaaagagcaggggattgatgcggacacgatcgatctcaaccgcaccaatgaagtggagtggcccttatacgatcgtgtcgtcatcggcgcatcaatccgctatggtcattttcatcccgccttagaacggtttgtaaaaacgcatcttcagtcgctgcaggcgctaccgggcgcctttttctcggtcaacctcgtcgcgcgtaagccagaaaaacgaacgccgcagacaaacagctacacccgcaagtttctgcttaactcgccgtggcagccgcagaactgcgcggtgtttgccggcgcgctccgctatccacgctatcgttggtacgatcggtttatgattcgccttattatgaagatgaccggcggcgaaacggatgtcagtaaagaagtggtgtataccgactggcagcaggtgggcagatttgcgcgggaaattgcgcaaatgaccagcaaatagcgcgttaaaccatcctggtgatggaaagttgagcgaacgaaaagttttttgaaatttccccttgtcacttcggaattactccctataatgcgctcccactgacacggaacaacggcttacagcccgccgggtcagcgggattcagcgatgaataccggcagagaaaagcgaaaataatcgcttgactctgaatgaggaaaacgtattatacgggacctcgcgacagagcgctgaagcgcgtcgcaactgctctttaacaatttatcagacaatctgtgtgggcactcaaagtgacatggattcttaatgtcttcggacaataaatgaataccaagtctctgagtgaacatacgtaattcattacgaagtttaattcacgagcatcaaacttaaattgaagagtttgatcatggctcagattgaacgctggcggcaggcctaacacatgcaagtcgaacggtagcacagagagcttgctctcgggtgacgagtggcggacgggtgagtaatgtctgggaaactgcctgatggagggggataactactggaaacggtagctaataccgcataacgtcgcaagaccaaagagggggaccttcgggcctcttgccatcagatgtgcccagatgggattagctagtaggtggggtaacggctcacctaggcgacgatccctagctggtctgagaggatgaccagccacactggaactgagacacggtccagactcctacgggaggcagcagtggggaatattgcacaatgggcgcaagcctgatgcagccatgccgcgtgtatgaagaaggccttcgggttgtaaagtactttcagcggggaggaaggcgataaggttaataaccttgtcgattgacgttacccgcagaagaagcaccggctaactccgtgccagcagccgcggtaatacggagggtgcaagcgttaatcggaattactgggcgtaaagcgcacgcaggcggtctgtcaagtcggatgtgaaatccccgggctcaacctgggaactgcattcgaaactggcaggctggagtcttgtagaggggggtagaattccaggtgtagcggtgaaatgcgtagagatctggaggaataccggtggcgaaggcggccccctggacaaagactgacgctcaggtgcgaaagcgtggggagcaaacaggattagataccctggtagtccacgctgtaaacgatgtcgacttggaggttgttcccttgaggagtggcttccggagctaacgcgttaagtcgaccgcctggggagtacggccgcaaggttaaaactcaaatgaattgacgggggcccgcacaagcggtggagcatgtggtttaattcgatgcaacgcgaagaaccttacctactcttgacatccagagaacttagcagagatgctttggtgccttcgggaactctgagacaggtgctgcatggctgtcgtcagctcgtgttgtgaaatgttgggttaagtcccgcaacgagcgcaacccttatcctttgttgccagcgattcggtcgggaactcaaaggagactgccagtgataaactggaggaaggtggggatgacgtcaagtcatcatggcccttacgagtagggctacacacgtgctacaatggcatatacaaagagaagcgacctcgcgagagcaagcggacctcataaagtatgtcgtagtccggattggagtctgcaactcgactccatgaagtcggaatcgctagtaatcgtggatcagaatgccacggtgaatacgttcccgggccttgtacacaccgcccgtcacaccatgggagtgggttgcaaaagaagtaggtagcttaaccttcgggagggcgcttaccactttgtgattcatgactggggtgaagtcgtaacaaggtaaccgtaggggaacctgcggttggatcacctccttaccttaaagaacctgcctttgtagtgtccacacagattgtctgatgaaaatgtagcagtaaaaaatctctgcaggcttgtagctcaggtggttagagcgcacccctgataagggtgaggtcggtggttcaagtccactcaggcctaccaaatttctgctgatgctgcgttgcggcgacactcacatactttagtatgcttcgtgtcaccacgccttgcctcaacagaaattaaggttgatgagatttaactacgatggggctatagctcagctgggagagcgcctgctttgcacgcaggaggtctgcggttcgatcccgcatagctccaccatctttactgcacaacacaagaaaacttcagagtgtacctgaaaaggttcactgcgaagttttgctctttaaaaatctggatcaagctgaaaattgaaacgacacactgttcaagtgtgttcgagtctctcaaattttcgcgacacgacgatgttttacgaaacatcttcgggttgtgaggttaagcgactaagcgtacacggtggatgccctggcagtcagaggcgatgaaggacgtgctaatctgcgaaaagcgtcggtaaggtgatatgaaccgttacagccggcgatgtccgaatggggaaacccagtgcaattcgttgcactatcgtttgatgaatacatagtcaaacgaggcgaaccgggggaactgaaacatctaagtaccccgaggaaaagaaatcaaccgagattcccccagtagcggcgagcgaacggggagcagcccggagtctgaatcagcttgtgtgttagtggaagcgtctggaaagtcgcagggtacagggtgatactcccgtacactaaaacacacaggttgtgaactcgaagagtagggcgggacacgtggtatcctgtctgaatatggggggaccatcctccaaggctaaatactcctgactgaccgatagtgaaccagtaccgtgagggaaaggcgaaaagaaccccggcgaggggagtgaaaaagaacctgaaaccgtgtacgtacaagcagtaggagcccactggttgggtgactgcgtaccttttgtataatgggtcagcgacttatattctgtagcaaggttaaccgtataggggagccgcagggaaaccgagtcttaactgggcgttaagttgcagggtatagacccgaaacccggtgatctagccatgggcaggttgaaggttgggtaacactaactggaggaccgaaccgactaatgttgaaaaattagcggatgacttgtggctgggggtgaaaggccaatcaaaccgggagatagctggttctccccgaaagctatttaggtagcgcctcgtgaactcatcttcgggggtagagcactgtttcggctagggggtcatcccgacttaccaacccgatgcaaactacgaataccgaagaatgttatcacgggagacacacggcgggtgctaacgtccgtcgtgaagagggaaacaacccagaccgccagctaaggtcccaaagtcatggttaagtgggaaacgatgtgggaaggcccagacagccaggatgttggcttagaagcagccatcatttaaagaaagcgtaatagctcactggtcgagtcggcctgcgcggaagatgtaacggggctaaaccatgcaccgaagctgcggcagcgacactatgtgttgttgggtaggggagcgttctgtaagccgttgaaggtggcctgtgagggttgctggaggtatcagaagtgcgaatgctgacataagtaacgataatgcgggtgaaaaacccgcacgccggaagaccaagggttcctgtccaacgttaatcggggcagggtgagtcgacccctaaggcgaggccgaaaggcgtagtcgatgggaaacaggttaatattcctgtactcggtgttactgcgaaggggggacggagaaggctatgttggccgggcgacggttgtcccggtttaagcatgtaggcggatgttccaggtaaatccggaacgtcactaacgctgaggtgtgatgacgaggcactacggtgctgaagtgacaaatgccctgcttccaggaaaagcctctaagcatcaggtaacatcaaatcgtaccccaaaccgacacaggtggtcaggtagagaataccaaggcgcttgagagaactcgggtgaaggaactaggcaaaatggtgccgtaacttcgggagaaggcacgctgatggtaagtgaagcgacttgctcgtggagctgaaatcagtcgaagataccagctggctgcaactgtttattaaaaacacagcactgtgcaaacacgaaagtggacgtatacggtgtgacgcctgcccggtgccggaaggttaattgatggggttatcctcgcggagaagctcttgatcgaagccccggtaaacggcggccgtaactataacggtcctaaggtagcgaaattccttgtcgggtaagttccgacctgcacgaatggcgtaatgatggccaggctgtctccacccgagactcagtgaaattgaactcgctgtgaagatgcagtgtacccgcggcaagacggaaagaccccgtgaacctttactatagcttgacactgaacactggtccttgatgtgtaggataggtgggaggctttgaagtgtggacgccagtctgcatggagccatccttgaaataccaccctttaatggctggtgttctaacgtgggcccgtaatccgggttgcggacagtgtctggtgggtagtttgactggggcggtctcctcctaaagagtaacggaggagcacgaaggtcagctaatcctggtcggacatcaggaggttagtgcaatggcataagctggcttgactgcgagcgtgacggcgcgagcaggtgcgaaagcaggtcatagtgatccggtggttctgaatggaagggccatcgctcaacggataaaaggtactccggggataacaggctgataccgcccaagagttcatatcgacggcggtgtttggcacctcgatgtcggctcatcacatcctggggctgaagtaggtcccaagggtatggctgttcgccatttaaagtggtacgcgagctgggtttagaacgtcgtgagacagttcggtccctatctgccgtgggcgctggagaattgaggggggctgctcctagtacgagaggaccggagtggacgcatcactggtgttcgggttgtcatgccaatggcattgcccggtagctaaatgcggaagagataagtgctgaaagcatctaagcacgaaacttgccccgagatgagttctccctgaccctttaagggtcctgaaggaacgttgaagacgacgacgttgataggccgggtgtgtaagcgcagcgatgcgttgagctaaccggtactaatgaaccgtgaggcttaaccttacaacgccgaagatgttttggcgatttgagaagacaacaatttcagcttagattcagagttgagtacgcaataaaagatggcgtactgagcacaaagaatttgcctggcggcactagcgcggtggtcccacctgaccccatgccgaactcagaagtgaaacgccgtagcgccgatggtagtgtggggtctccccatgtgagagtagggaactgccaggcatcaaacaagtgaagagcccatcctgacggatgggctttttgcgttttcgtcgtttaaaattgccagattttagtcacgccatggtacctgctccccctgacaatcaggaagccttccctcgctatatacggtaaactaatgcagattttgcatctggaagccattatgagccactcacttaagccctggaacaccttcggtattgaccgttctgccaaagcgattgtacgcgccgaaactgaaaaacagctactggatgcctggcaaaatgccaccgcagagcgccagccaaccctgatccttggtgaaggaagcaatgttctgttcctgaaggattattccggtacggtcattatcaaccgtattatggggatagaagtgagtgaaacatctgacacgtggcatttacatgttggtgcaggagaaaattggcatcagctggtccagtttgcgctaaataacggaatgccgggcctggaaaatcttgctttgattcctggctgcgccggctcctcgccgattcaaaatattggtgcttacggcgttgaattacagaaagtttgccgctacgtcgactgcattgagttggtcacgggtgtgaaacagcgtctttccgctgctgaatgtcgctttggctaccgggacagtatttttaaacatgaatatcaggaccgctacgccattgtggcggttggtttgacgttgccaaaagcctggcaacccgttttgacctacggtgatttaacccggctcgatccgcaaaccgttaccccgcagcaggtatttgacgccgtctgtcatatgcgcatgaccaaactccccgatccaaaagtgaatggaaatgcggggagcttctttaagaacccggtcgttagcgcggacaaggcgcaagcgctgctggcgacctatccgggtatccctcactaccctcagctggatggcagtatgaaacttgccgccggctggcttatcgatcaatgccagcttaaaggtaaagtgatgggtggcgcagcggtgcatagccagcaggcgctggtattgatcaatcagcatcaggcaaccagtgaagacgtggttgagctggctcattacgtacgccagcaggttggtgagaagtttaatatttggttacagccggaagtgcgctttatcggtgaaacgggtgaagttaatgccgaggagaccatcgcatgaaagactacaccgttcctttgacgctaatatcgatcctggccgacgctgaatttcactcaggtgaacagcttggcgagcgtttagggatgagtcgggcagcaatcaacaagcatattcaaacgttacgcgattggggagtcgacgtatttaccgttccgggtaaaggctacagtctccctgagcctatccagcttctggatgaagagcagatcgccaggcagatcgagcatggccgggtaaccgtactaccggtgattgattccacgaaccagtatcttctggacagacttagcgaactgcaatcgggtgatgcctgcgtggctgagtatcagcaggcaggtcgcggccgccgcgggcgcaagtggttctcgccgtttggttctaacctttacctttcaatgtactggcgactggagcagggccctgctgcggctataggtttgagtctggtcattgggatcgtcattgccgaggtgctgcaaagcctgggggcggataaagttcgggtgaaatggccaaacgatctctatttacaggatcggaagctgtccgggatcctggtggaactgacggggaaaaccggcgatgctgcgcagatagtcagcggcgcggggatcaacctcatgatgcgccgggtggagtctgatgttgtcaatcagggttggatcagcctccaggaggcagggatctctatcgatcgtaatacgttagcggcttgtctgattaaagagctgcgggcggggtttaaactttttgagaatgaaggtctggcaccctatctcacccgctgggaaaagctcgataactttattaatcgaccggttaaacttattattggcgataaagagatctttggtatttcgcgaggtattgatgctcaaggcgcattattactggagcaggacggggtggtaaaaccctggattggcggtgagatatcattgcgcagcgctgaataaaaaaaggggagctaacgctcccttttttattttcttaaacgcacctgattcaccgagtggtttgcgcttttggtcattataaggctggctcgctcacgggttggtagaatgttctcttttaaattcaaaagattaatctcattccacagcgatgtggcaatatcaattgcttcatctttagacagctgagcatagctatgaaaataggagtccgggtcggtaaacgcgccttcgcggaatttcagaaaacgattgatataccagttttttagcagttcttcaggcgcatcaacgtaaattgaaaaatcaacgaagtccgaaacaaatacatgatgcggatcgtgtggataatccatgccgctctgcagaacatttaatccctcaagaattaatatatcaggctgcgtgacggttttatccccatcagggatgacgtcgtaaatcagatgtgaatagaccggcgccgtagcgtcaggaacgccggatttcaggtctgagacgaatttaaccaggcgatgcatgtcataagactgcgggaagcccttcttcttcatcaggccgcgttctttcaataccgcgttaggatgcagaaaaccatctgtcgtgattaattctacatgtcgatgttcaggccagcggctcagcaatgcttgcagcacgcgcgcggtagtgctcttcccgaccgccacgctacccgcaatgctaatgatgtaaggaatacgttggccgttggtgccaaggaattgttccagtacagcctggcggcgcagattagagctgatatagaaattgagtaaacgcgacagcggcaaataaatttccgctacttcttccagggaaagatcttcgttgatgccttttaaccgcgtgatttcttcttctgttagcgtcatcggaacggaatcacgaagcgcagcccattggtcgcggttaaattgtagatacggtgtcattaacgtttgctcttttaggctcataagcatgctcttgcaaccgccgaattacatgaaggcggggtgcttcacactagttaatcaggacaatgggcaggagggtaacaccagattgcgaggaataataagaaaaaaactcattgaatgatgctttctaaaggtagcatcacagagatgaatggtttggtaaggggatataaagttctcagcagagacccgtgggttattcattgaatcgggtggtcaggtgatggggtatcgatgccgctttagcgacatcactctactttttgccctcctcggcaaccctgtccgtgaggatgattggcgtatttttgtcctgctctgtttgaaattacaccattttttctcgtttgagaacaaaatgtgagcaatagaacattttctgcaattttttagttgcatgaactcgcaggtctccctagaatgcgcgctacttgatgccgacttagctcagtaggtagagcaactgacttgtaatcagtaggtcaccagttcgattccggtagtcggcaccatcaagtgcctggtggggttcccgagcggccaaagggagcagactgtaaatctgccgtcatcgacttcgaaggttcgaatccttcccccaccaccatctttcggcaacgctttgcggagccagagttgattggttaaactggtcagctcaaacaaaaaaagagacgcttctcttttttttgttatagaaagaactgggtagccgagtttcaggatgcgggcatcgtataatggctattacctcagccttccaagctgatgatgcgggttcgattcccgctgcccgctccaaacgtgctgatatggctcagttggtagagcgcacccttggtaagggtgaggtccccagttcgactctgggtatcagcaccacttctttatctctcctcccctgtttctctcttgtttattgcattcaacaagtcgggcatgttgcccggttgatgtggtgatatcaccgatttatccgtgtcttagagggacaatcgatgtctaaagaaaagtttgaacgtacaaaaccgcacgttaacgtcggtactatcggccacgttgaccatggtaaaacaacgctgaccgctgcaatcactaccgttctggctaaaacctacggtggttctgctcgcgcattcgaccagatcgataacgcgccggaagaaaaagctcgtggtatcaccatcaacacttctcacgttgaatatgacaccccgactcgccactacgcgcacgtagactgcccgggccacgccgactatgttaaaaacatgatcaccggtgctgcgcagatggacggcgcgatcctggttgttgctgcgactgacggcccgatgccgcagactcgtgagcacatcctgctgggtcgtcaggtaggcgttccgtacatcatcgtgttcctgaacaaatgcgacatggttgatgacgaagagctgctggaactggttgaaatggaagttcgtgaacttctgtctcagtacgatttcccgggcgacgacactccgatcgttcgcggttccgctctgaaagcgctggaaggcgacgcagactgggaagcgaaaatcatcgaactggctggctacctggattcttacatcccggaaccagagcgtgcgattgacaagccgttcctgctgccgatcgaagacgtattctccatctccggtcgtggtaccgttgttaccggtcgtgtagagcgcggtatcatcaaagttggcgaagaagttgaaatcgttggtatcaaagagactgcgaagtctacctgtactggcgttgaaatgttccgcaaactgctggacgaaggccgtgctggtgagaacgttggtgttctgctgcgtggtatcaaacgtgaagaaatcgaacgtggtcaggtactggctaagccgggttctatcaagccgcacaccaagttcgaatctgaagtgtacattctgtccaaagacgaaggcggccgtcatactccgttcttcaaaggctaccgtccgcagttctacttccgtacaactgacgtgactggcaccatcgaactgccggaaggcgtagagatggtaatgccgggcgacaacatcaaaatggttgttaccctgatccacccgatcgcgatggacgacggtctgcgtttcgcaatccgtgaaggtggccgtaccgttggcgcgggcgtggttgctaaagttctcggctaattgctgataacatttgacgcaatgcgcaataaaagggcatcatttgatgccctttttgcacgctttcacaccagaacctggctcatcagtgattttttgggtcataatcattgctgagacaggctctgaagagggcgttaagtccgaaacgcagcagagcatttcggtttggtcgcctcgcatttcatgcggggtgaagttatttgtctgaattcttgtgacaggttggtttatgagtgcgaataccgaagctcaagggagcgggcgcggcctcgaagcgatgaagtggacaatcgtagtcgtgctgctgattgtggccatcgtcggcaacttcctttatcgtgacattatgctggcagtgcgtgcgctggctgtagtgattctgatcgctgcagcgggcggtgtcgcgctgttaacgacaaaaggtaaggcgacagtcgccttcgctcgtgaagcgagaaccgaagtccgcaaggtgatctggccgactcgccaggaaacgttgcataccacgctgattgttgccgcagtgactgccgtaatgtcactgatcctgtggggactggatggtattctggttcgcctggtatcctttatcactggcctgaggttctgagatgtctgaagctcctaaaaaacgctggtacgtcgttcaggcgttttccggttttgaaggtcgcgtagctacctcgttgcgtgaacatatcaaattacacaatatggaagagttgtttggcgaagtcatggtgccgaccgaagaagtggtcgaaatccgcggcggccagcgtcgtaaaagcgaacgcaaattcttcccgggctacgtgctggtccagatggtgatgaacgacgcgagctggcacctggtgcgcagcgtaccgcgtgtgatgggtttcatcggcggtacatctgaccgtccggcaccgatcagcgacaaagaagtcgacgcgatcatgaaccgtctgcagcaggttggcgataagccgcggccgaaaacgctgtttgagccgggtgaaatggttcgcgttagcgacggtccatttgccgactttaacggtgtggttgaagaagtggactacgagaagtctcgtctgaaagtgtccgtttctatcttcggtcgtgcaacgccggttgagctggacttcgctcaggtagaaaaagcctaacagccgatcaaaaaagcaacgttttaatcgttgcatgaggcgcggaattgacatacaatttcgcgccttttgtttttatgggtctgattcccataaagcgatatttatcacggggagcctttttaggcgctacacccaaacgaggaaatttacatggctaagaaagtacaagcctatgtcaagctgcaggttgcagctggtatggcaaacccgagtccgccggttggtccagcactgggtcagcagggtgtgaacatcatggaattctgcaaagcgttcaacgcaaaaactgaatccctggaaaaaggtctgccgatcccggttgttattaccgtttacgctgaccgttctttcaccttcgttaccaaaactccgccggcagcagttctgctgaaaaaagcggctggtatcaagtctggttccggtaaaccgaacaaagacaaagtaggtaaaatttcccgcgctcagctgcaggaaatcgcgcagaccaaagctgccgacatgactggttccgacattgaagcgatgactcgctccattgaaggtactgcacgttccatgggcctggtagtggaggactaagaaatggctaaactgaccaagcgcatgtccgtgattcgtgacaaagttgatgcgaccaaacagtacgacatcaacgaagccatctctctgctgaaagaactggctactgctaagttcgttgaaagcgttgatgttgccgttaacctcggcatcgacgcgcgtaaatctgaccagaacgtccgcggcgcgaccgtactgccgcacggtactggccgttcagttcgcgtagccgtatttgcccagggcccgaacgctgaagcagctaaagctgctggcgcagagctggtaggtatggaagatctggctgaccagatcaaaaaaggcgaaatgaactttgacgttgttattgcttccccggatgcaatgcgcgttgttggccagctgggccaggttctgggtccgcgcggcctgatgccaaacccgaaagtgggtaccgtaacgccgaacgttgctgaagcggttaagaacgctaaagcaggtcaggttcgttaccgtaacgacaaaaacggcatcatccacaccaccatcggtaaagtggattttgacgctgataaactgaaagaaaacctggaagctctgctggttgcgctgaaaaaagcaaaaccgactcaggctaaaggcgtgtacatcaagaaaatcagcatctccaccaccatgggtgctggcgttgccgttgatcaggctggtctgagcgcatctgcgaactaagattagctttacgtgggcggtggttttgtctacaattctacccccacgattctgttgaaatataacagagcactatgcgagtcatttgaattgcagcaaggcagcaagtgagtgaatcaccaggagcatagttaactatgtgactggtgtgaacgagcgcagctaacacagctgcggttcaaaggacgaagtcatagaaagaatttgttcgttggagcctggcctatccaggcctccgtcgaagaccgcaggtgtttcgcaagagacttaatgccctgcgtagacggtgacagaacgctaagattatttttggatactctggcttgtttctgctcaccgtattaagacgctcttctctttgagtcgagtgaagtgagttccggagcatgagctctggcaaacatccaggagcaaagctaatggctttaaatcttcaagacaaacaagcgattgttgctgaagtcagcgaagtagccaaaggcgcgctgtctgcagtagttgcggattcccgtggcgtgactgtagacaaaatgactgaactgcgtaaagcaggtcgtgaagctggcgtatacatgcgtgttgttcgtaacaccctgctgcgccgcgtcgttgaaggtactcctttcgagtgcctgaaagacacgtttgttggtccgaccttgattgcatactctatggaacacccgggcgctgccgctcgtctgttcaaagagttcgcgaaagcgaatgcaaaatttgaggtcaaagccgcagcctttgaaggtgagctgatcccggcgtcgcaaatcgaccgcctggcaactctgccgacctacgaagaagcaattgcacgcctgatggcaaccatgaaagaagcttcggctggcaaactggttcgcactctggctgctgtacgcgatgcgaaagaagctgcttaatcgcagttgtctttgtaaagcattcgcttacgtataaacttattctgatattcaggaacaatttaaatgtctatcactaaagatcaaatcattgaagcagtatccgctatgtccgtaatggacgttgttgagctgatctctgcaatggaagaaaaattcggtgtttccgctgctgctgctgtagctgtagctgctggcccggttgaagctgctgaagaaaaaactgaattcgacgtaattctgaaaggtatcggcgctaacaaagttgccgttatcaaagcagtacgtggcgcaactggcctgggtctgaaagaagctaaagacctggtagaatctgctccggccgctctgaaagaaggcgtgagcaaagatgacgctgaagcactgaaaaaatctctggaagaagctggcgctgaagttgaagttaaataagccaacctttccggttgcagcctgagaaatcaggctgatggctggtgactttttagtcaccagcctttttgcgctgtaaggcgccagtagaatttcacactgtttgactactggttgtcctgacaatgcttgtttctatagacgacttaatatactgcgacaggttagggctcctgagctgtgtaaatcgcaatgaaatggtttaagcgtgatagaaacaggtattgcggaaagtgttccattttccggtcaacaaaatagtgttgcataaaaaactgccttatgtgggcagatgggtcgacttgtcagcgagctgaggaaccctatggtttactcctataccgagaaaaaacgtattcgtaaggattttggtaaacgtccgcaggttctggacataccttatctcctttctatccagcttgactcgtttcagaagttcatcgagcaagatcctgaagggcagtatggtctggaagcagctttccgttccgtattcccgatcaaaagctacagcggtaactctgagctgcagtacgtcagctaccgtctgggcgaaccggtttttgacgttaaagaatgtcagatccgtggcgtgacctactcggcaccgctgcgcgtcaaactgcgtctggtgatctacgagcgcgaagcgccggaaggcaccgttaaagacattaaagaacaagaagtctacatgggcgaaattccgctcatgaccgacaacggtaccttcgttatcaacggtaccgagcgcgttatcgtttctcagctgcaccgtagcccgggcgtcttctttgacagtgacaaaggtaagacccactcttccggtaaggtcctgtataacgcacgtatcattccttaccgtggctcctggctggacttcgagttcgacccgaaagacaacctgtttgtccgtatcgaccgtcgtcgtaagctgccggctaccatcatcctgcgcgcgctgaattacaccactgagcagatccttgacctgttcttcgagaaagtggtctttgaaattcgcgataacaagctgcagatggaactggtaccggagcgtctgcgcggcgaaacggcctccttcgacatcgaagcgaacggcaaagtgtacgttgagaaagggcgtcgcatcaccgcacgtcacattcgccagctggaaaaagacgatatcaaacatatcgaagttccggttgagtacatcgctggcaaagttgcctctaaagactatgttgacgaatctactggcgagctgatctgcccggcgaacatggagctgagcctggatctgctggccaagctgagccagtctggccataagcgtatcgaaacgctgttcaccaacgatctggatcacggtccgtacatctctgagactgtacgcgtcgacccgaccaacgaccgtctgagcgcgctggtagaaatctaccgcatgatgcgcccgggtgagccgccgactcgtgaagcggctgaaagcctgttcgagaacctgttcttctccgaagaccgctacgatctgtccgcggtaggtcgtatgaagttcaaccgttctctgctgcgcgacgaaatcgaaggttccggtatcctgagcaaagaagacatcatcgaagtgatgaagaagctcatcgatatccgtaacggtaaaggcgaagtcgatgatatcgaccacctcggcaaccgtcgtatccgttccgttggcgaaatggcggaaaaccagttccgcgttggcctggtccgcgtagagcgtgcggtgaaagagcgtctgtctctgggcgatctggataccctgatgcctcaggatatgatcaacgccaagccgatttctgcggcagtgaaagagttctttggctccagccagctgtctcagtttatggaccagaacaacccgctgtctgagattacgcacaaacgtcgtatctctgcactcggcccgggcggtctgacccgtgaacgcgcaggctttgaagttcgagacgtacacccgacccactacggtcgcgtatgtccaatcgaaacgcctgaaggtccgaacatcggtctgatcaattccctgtccgtgtacgcacagacgaacgaatacggtttcctcgagaccccgtaccgtaaagtgactgacggtgttgtaaccgacgaaattcattacctgtctgctatcgaagaaggcaactacgttattgctcaggcgaactccaacctggatgacgaaggccactttgtagaagatctggttacctgccgtagtaaaggcgaatccagcttgttcagccgcgaccaggttgactacatggacgtatccacccagcaggtggtatccgtcggtgcgtccctgatcccgttcctggaacacgatgacgccaaccgtgcattgatgggtgcgaacatgcaacgtcaggccgttccgactctgcgcgctgataagccgctggttggtaccggtatggaacgtgctgttgccgttgactccggtgtaactgcggtcgctaaacgtggcggtaccgttcagtacgtggatgcttcccgtatcgttatcaaagttaacgaagacgagatgtacccgggcgaagcaggtatcgacatctataacctgaccaagtacacccgttctaaccagaacacctgcatcaaccagatgccgtgtgtctctctgggtgagccgattgagcgcggtgacgtgctggctgacggcccgtctaccgacctcggtgaactggcgctcggccagaacatgcgcgtcgcgttcatgccgtggaacggttacaacttcgaagactccatcctcgtttccgagcgtgttgtccaggaagaccgttttaccaccatccacattcaggaactggcgtgcgtgtctcgtgacaccaagctggggccggaagagatcaccgccgacatcccgaacgtgggtgaagctgcgctctctaaactggatgaatccggtatcgtttatatcggcgcggaagtgaccggtggcgatattctggttggtaaggtaacgccgaaaggtgaaacccagctgacgccggaagagaaactgctgcgtgcgatcttcggtgagaaagcgtctgacgttaaagactcttccctgcgcgtaccaaacggtgtctccggtaccattatcgacgttcaggtctttacccgcgacggcgtagaaaaagacaaacgtgcgctggaaatcgaagagatgcagctcaaacaggcgaagaaagacctgtctgaagaactgcagatcctcgaagctggcctgtttggtcgtatctacgcggtgctggtctccggcggtatcgaagctgagaagctcgataagctgccgcgcgatcgctggctggaacttggcctgaccgacgaagagaaacagaatcagctggaacagctggctgagcagtacgacgaactgaaacacgagttcgagaaaaaactcgaagcgaaacgccgcaaaatcactcagggcgacgatctggcaccgggcgtgctgaagattgtcaaagtgtatctggccgttaaacgtcagattcagcctggtgacaaaatggcaggccgtcacggtaacaagggtgttatctctaagatcaacccgatcgaagatatgccttacgatgaaaacggcacgccggttgacatcgtactgaacccgctgggcgtaccgtctcgtatgaacatcggtcagatcctggaaactcacctgggtatggctgcgaaaggtattggcgagaaaatcaacgccatgctgaaacagcagcaggaagtcgccaaactgcgcgaattcatccagcgtgcctacgatctgggcaccgacgtgcgtcagaaggttgatctgaataccttcactgacgaagaagttatgcgtctcgctgaaaacctgaaaaaaggtatgccgatcgcaacgccggtcttcgacggtgcgaaagagtctgaaatcaaggaactgttacagcttggtggcctgccgacttccggccagatcaccctgttcgacggtcgtaccggtgagcaattcgagcgccaggttaccgttggctacatgtacatgctgaaactgaaccacctggttgatgacaagatgcatgcgcgttctaccggttcttacagcctggttactcagcagccgctgggtggtaaggcgcagttcggtggtcagcgcttcggggagatggaagtgtgggcgctggaagcatatggcgcagcatacaccctgcaggaaatgctcaccgttaagtctgatgacgtgaacggccgtactaagatgtataagaacatcgtggacggcaaccatcagatggaaccgggcatgccggaatccttcaacgtactgttgaaagagattcgctcgctgggcatcaacatcgaactggaagacgagtaactctcgctcaaacaggtcactggtgccggggtaagacccggcgccagattgtgctaactccgacgggagcaaatccgtgaaagacttattaaagtttctgaaagcgcaaactaaaaccgaagagtttgatgcgatcaaaattgctctggcatcgccagacatgatccgttcatggtcttttggtgaagttaaaaagccggaaaccattaactaccgtacgttcaaacctgagcgtgacggccttttctgtgcgcgtattttcgggccagtaaaagactacgagtgcctgtgcggtaagtacaagcgcctgaaacaccgcggtgtgatctgtgagaagtgcggcgttgaagtgacccagactaaagtgcgccgtgagcgtatgggccacatcgagctggcgtctccgaccgcccacatctggttcctgaagtctctgccgtcccgtatcggcctgctgctcgatatgccgctgcgcgatatcgaacgcgtgctgtacttcgaatcctatgtggttatcgaaggcggtatgaccaacctggaacgccagcagatcctgactgaagaacagtatctggacgcgctggaagagttcggtgacgaatttgacgcgaagatgggtgcggaagctatccaggccctgctgaagagcatggatctggagcaagagtgtgaaactctgcgcgaagagctgaacgaaaccaactccgaaaccaagcgtaagaagctgaccaagcgtatcaaactgctggaagcgttcgtccagtctggcaacaagccggagtggatgatcctgaccgttctgccggttctgccgccagatctgcgtccgctggttccgctggatggcggtcgtttcgcgacttctgacctgaacgatctgtatcgtcgcgtcattaaccgtaacaaccgtctgaaacgtctgctggatctggctgcgccggacatcatcgtacgcaacgaaaaacgtatgctgcaggaagcggtcgacgccctgctggataacggtcgtcgcggtcgtgcgatcaccggttctaacaaacgtcctctgaaatctttggccgatatgatcaaaggtaagcagggtcgtttccgtcagaacctgctcggtaagcgcgttgactactccggtcgttctgtaatcaccgtaggtccatacctgcgtctgcatcagtgcggtctgccgaagaaaatggcgctggagctgttcaaaccgttcatctacggcaagctggaactgcgtggcctcgccaccaccatcaaagccgctaagaaaatggttgagcgtgaagaagctgtcgtttgggatatcctggacgaagtgatccgcgaacacccggtactgctgaaccgtgcaccaaccctgcaccgtctgggtatccaggcatttgagccagtcctgatcgaaggtaaagctattcagctgcacccgctggtttgtgcggcatacaacgccgacttcgatggtgaccagatggctgttcacgtaccgctgacgctggaagcccagctcgaagcgcgtgcgctgatgatgtctaccaacaacatcctgtctccggcgaacggcgaaccaatcatcgttccgtctcaggacgttgtactgggtctgtactacatgacccgtgactgtgttaacgccaaaggcgaaggcatggtgctgactggcccgaaagaagctgagcgtatttatcgcgctggcctggcctctctgcatgcgcgcgttaaagtgcgtatcactgaatacgaaaaagatgctaacggcgaattcgttgcgaaaaccagcctgaaagacacgactatcggccgtgccattctgtggatgatcgtaccgaaaggtctgcctttctccatcgtcaaccaggcgctgggtaagaaagcgatctccaaaatgctgaacacctgctaccgtattctgggcctgaaaccgaccgttatttttgcggaccagacgatgtacaccggctttgcttatgcagcgcgctcaggtgcatccgttggtatcgatgacatggtcatcccggagaaaaaatacgagatcatcagcgaagcggaagcggaagttgctgagattcaggagcagttccagtcgggtctggttaccgctggcgaacgctacaacaaagttatcgatatctgggccgcggcgaacgatcgtgtatccaaagcgatgatggacaacctgcaaactgaaaccgttattaaccgtaacggcgaagaagagcagcaggtctccttcaacagcatttacatgatggccgactccggtgcgcgtggttctgctgcacagattcgtcagcttgccggtatgcgtggtctgatggcgaagccggatggctccatcatcgaaacgccaatcaccgcgaacttccgtgaaggtctgaacgtactccagtacttcatctccacgcacggtgcgcgtaaaggtctggcggataccgcactgaaaacggcgaactccggttacctgactcgtcgtctggttgacgttgcgcaggacctggtcgtgactgaagacgactgtggcaccctggaaggcatcaccatgaccccggttatcgagggtggcgatgttaaagagccgctgcgcgatcgcgtactgggtcgtgtgaccgctgaagacgttctgaagccgggtacggcggacattctggttccacgcaacacgctgctgcacgagcactggtgcgatctgctggaagagaactccgttgactccgtcaaagtgcgttccgttgtatcctgtgacaccgactttggtgtatgtgcgcactgctacggtcgtgacctggcgcgtggccacatcatcaacaaaggtgaggctatcggcgttatcgcagcacagtccatcggtgagccgggtacacagctgacgatgcgtacgttccacatcggtggtgcggcatctcgtgcggctgctgagtccagcatccaggtgaaaaacaaaggtagcatccgtctgagcaacgcgaagtcggttgtgaactccagcggtaagctggttattacttcccgtaataccgagctgaaactgatcgacgaattcggtcgtaccaaagagagctataaagtgccttacggctccgttatggcgaaaggtgatggcgagcaggttgccggcggtgaaaccgtagcaaactgggatccgcacaccatgccggttatcaccgaagtgagtggttttgtccgcttcactgacatgattgacggccagaccattactcgtcagaccgacgagctgaccggtctgtcttctctggtggttctggattctgcagagcgtaccactggcggtaaagatctgcgtccggcgctgaaaatcgttgatgctcagggcaatgacgttctgatcccgggtaccgacatgcctgcgcagtacttcctgccgggtaaagcgattgttcagctggaagatggcgtccagatcagctctggtgacaccctggcgcgtgtaccgcaggaatccggcggtaccaaggacatcaccggtggtctgccgcgcgttgccgacctgttcgaagcgcgtcgtccgaaagagccggcaatcctggctgaaatcagcggcatcatttccttcggtaaagaaaccaaagggaaacgtcgtctggttatcaccccggtagacggtagcgatccgtacgaagagatgattcctaagtggcgtcagctcaacgtgttcgaaggtgaacgcgtagaacgtggtgacgtggtttccgacggtccggaagcgccgcacgacattctgcgtctgcgtggcgtgcatgctgtgactcgttacatcgttaacgaagttcaggacgtataccgtctgcagggcgttaagattaacgataagcacatcgaagttatcgttcgtcagatgctgcgtaaagcgaccatcgaaagcgccggtagctccgacttcctggaaggcgaacaggttgaatactctcgcgttaagattgctaaccgcgatctggaagcgaacggcaaagtgggtgcaacattctcccgcgatctgctgggtatcaccaaagcgtccctggcaaccgaatcgttcatctctgccgcatcgttccaggagaccacccgtgtcctgaccgaagcagccgttgcgggtaaacgcgacgaactgcgtggcctgaaagagaacgttatcgtgggtcgtctgatcccggccggtaccggttatgcgtaccaccaggatcgtatgcgccgtcgcgcagcgggcgaactgccagcagcgccgcaggtcagcgtggaagaagcttctgctaacctggcagaactgctgaacgcgggtctgggcggttctgacaacgattaatcgttgattcgctaaacgctcaaaaagccagtcaggtcacctgactggcttttttattgcttgccagtttattccgtctacttttttattacattttattgatgtaatagctgcaattaattagcaaatataaaccactcctataatgatttatttccatgactgtttttcatcttcaatgaaagggtgaaaattctacgcgtgtcaaaaaataagcaccgcaaacgctatatagtcaaaaaactaaaataatcatgtgattactttcccggttcttttcggtttaccgcagccgaggggattgttacgcctgttaaaaggcgatggaggaggtgaactaataaaaacaaagcggagagtattgtcgttatttaatggatagcttctgggggatgtatggaatttgctatacaacttatcattatcttaatttgtttgttctatggtgcgagaaagggcggcattgcgctcggtcttttaggcggtattgggctagttatcctggtctttgtttttcacctgaagcctggaaaaccgcccgtcgatgtcatgctggttattatcgccgtcgtggcggcatcggcgacgctgcaggcttccggtggtctagacgtgatgctgcagattgccgagaaactcctgcggcgaaacccgaaatatgtctcgatcgtcgcgccattcgtcacctgtacgctgacgattctttgcggcacggggcacgtggtatataccattctgccgattatttatgatgtcgccatcaaaaataacatccgtccggagcgacccatggccgccagctcgatcggcgcacagatggggattatcgccagcccggtttccgtggcggtcgtctcgctggtggcaatgcttggcaactttacctttaacggcaagcaccttgaatttctcgacctgctggcgataaccattccgtccacgctgctggggattctggccattggtatcttcagctggtttcgcggcaaagacctcgataaagacgaaactttccaggcctttattgcggtaccggaaaaccgtcactacgtgtacggggacacggccacgctgctggatagaaagcttccgaccagcaactggattgcgatgtggatttttctggcctcaatcgcggttgtcgccctgctcggcgccttctccgaactgcgtccggcattcgacggtaagccgctgtcgatggtgctggtgatccagatgtttatgctgctctccggggcgctcatcatcatcattacgaaaacgaatccggcttcgatctccaaaaatgaggtgttccgttccgggatgatcgctatcgttgccgtgtacggcatcgcgtggatggcggaaacgatgttcggcgcgcacatgaccgagattaaaggcgtgctcggggagatggtgaaggagtacccgtgggcctacgctatcgttctgctgctggtatcgaagtttgttaactcccaggcggctgcgctggcggcgatcgtcccggtggcgttggcgattggcgtcgatccggcctacatcgtcgcttccgcgcccgcctgctacggctattacattctgccgacctacccaagcgatctggcggcgattcagttcgaccgctcaggtactacgcatatcggccgctttgttattaaccatagctttattctgccagggctcattggcgtcagcgtctcatgcgtctttggctgggtatttgcagcgatgtacggatttctttaagaggatacgggcgccggtagcggcgcctgttaagtcgttgacgttattgtgcgagcggaattcggcgatagagctcaatcatgtcggtagccagatcctgaatgaccatcgcgttcatcaggtggtcctgagagtgtacggtaatcaggttaaccggaagcttgccgctgccttcatccatgccaatcagctgggtctggattttatgcgcatgcttgacgaattcatgggattccgccattgcctgttcggccgcagcaaaatcgcctttacgcgccagctgcagagcggttaacgccgagctgcgcgcagaaccggcgttaaccagcagctccatgatgatcgtttctaaatcttccatctcttactccatcagcttcagggctttatcaagcacggcatcgcctttcatcatgccgtaatccatcatatcgatgacggcgacttttttaccaaacgggtcggccattgcctgtagcttggcctgctcgtacttcacctgagggccgagcaggataatatcggcagcggcaagattatctttaaactcggcaaccggtacggctttgatggagacttccacgcctttttgttgcgcagcggcctgcatacgttgaaccagcatgctggtggacattcctgcggcacagcataaaacgatattcttcataattgttggcccttatgttccttgatgtaccatctttatcgcgggcaggcgggcgggacaaccgctttacggtgattgtgtgtaagtcatcacaaaataatgaaaccggtttcggtttttggggcgaaaacgctaaaagccgcgtccgacaggcctgaaacggtgggctctgttaagcgcggacgatgcgattcttgcccagctgcttggctttatacagcgcttcatcaacgcgcacgacaagctgctccaggggctccatattccattcgccgagacctgcgctgaaggtgaccgtcaatccttcttcacgccaggagcgctgcgcgacgcgggcccgccagctctcaagcagcatcagggcgtcatcgctatgtccggtggtaaagatcgccgcaaactcttcgccgccgtagcggtaaagcgaaatttgccggggctggaggatttgcagcccttcccgggcgacattgcgcagcacgatatcgccgttgaggtgaccccaggtgtcgtttatcgttttgaagttatcaatatcaaccagcgcaagagaaaagggctgatgatcgttcatcagcgcggcgatatcgctgtcaaaggcgcggcggttcttgcagccggttagcgcgtcgatggtcgcctggcgaacgtaggttaactcgcgctgcttattgctctcgatggctttgctgagcatcgcttccagccgcggggcgcgctgaacatccccggttttaatcgcattgatgatgttcatcaacaccgtacgcgaagcatggcgcagatacagtccaaacagcacgataacgatcgcggccagggcaaagctccaggcgacgatatccgtttcatggcgcgttaagttgaccagcgtcgagttatcgacccgataaataacaaaccagtcggggttggtaaaggagtagtaatagtaccaggtgtccgtattggtgtcgtacagctggccttcgccgctggtcattctgtccatcaaggcttcactgacgtagggtttaaacaaagcgccgggatcgggatggagaacgactttaccatcgcgttgcaccacaaaaaactccccctggacgggtgcaaccatctgccgtaacgcgtagcccattgaggtgagatcgagatgaaacgcgagactgccctttagccgtccctctggagaaattatgggtttgtagacggtaatcgtcgggtgatgcgtgaagtagtcgttgtacgggctggtataccgactgaaggtactggcttccgcttgcttaataaaccacggccttgttttggcatcgaaggactggctgtcttcggtttccagaacctcgggcgcgcgcagatagtgcccattggtatccgccagcgagatggacgaaacggtctgcatcatattttgcaactgcataagctgcatcaaccctttttccggattgacgttaaccgcctcattcagcgcatcgttgcgggcaaagaaggtggcggcacgggtgaggataaagtcgttgccctgcagcagcgtctccgtgtagttggtcgccatattgtgggtaaaattgcgattaatatgatgataatcttcgagaaaatcattcctctgcgtcgtcgtggcaaacaccgctatcagcaagaagctgaataaaatacctgcaaatccgatgataatcggcgtggtgaaagagagctttctattatgacgagccatgagtcgtaaatcgttccagaagcgttaaaccgtgggtggagacgcaggtttagccagcatgcctgctgagcgaatcagataaaactccggtaattataacgctgacgttgtgatatggactgattaatattcgatattgatggcattaccgttgccacaaagaggcgggagcagggcgaaaaggaggaagagtgaatattcgccctggtcagcgtccgctgctgacaggggcagaatagagaaacgggaacagggccacaatctcccgtttctcttattaagatcgtgcatgaagaacgtttaagaaattacattcgttatcatgacgattgggaggcgcgtcccagccagctgtcccaatccttccataccggctgtagaccgctggccaccagcgcgctggcgacctcttccgggcggcggtcatcgtgaggcgcgaactgctccagctccggatggttatcggcatacccgccgggctgggttttcgaaaaggcgctgacgttgttgatggccagcgggatcacccgatcgcggaaccagggggattcgcgggtggagagcgagagttccacttccggagccagcaggcggaaagcgcaaatagtttgcaccagctgccgttcatccattaatgaggcgggctcgatacctcccgcgcaaggccgcagtcgtgggaaggagatggagtagcggctgcgccagtaatgctgctggagccacagcagatgctccgccaccataaagcagtccacccgccagctgtcggaaaggccaataagtgcgccaaggccaattttatcaatccccgcctgcccaagcctgtccggcgtatccagccgccagaagaagtcctgctttttccctttcagatggtgtttcgcatacatgctttcatgataggtctcctgatagaccatcaccccgtccagaccgagggttttcagctcggcgtactcttccatcgccagcggctggacctccatatgcagcgaggcgaactggcggcgaatcgcgggcagatgttgacgaaagtagtccatgccgaccttgccctgatgttcgccggtcaccagcagcagatgctcaaagcccatttcgcggatcgccgcgcattcacgggctatttccgcctcatccagagtcttgcgcttgatgcggttactcattgagaaaccgcagtaggtacagtcgttggcgcagagattagagagatacagcgggacataaaagctgacggtattaccaaaacgctggcgagtcaggcgctgagcgcgctgggccagaggctccagatagtccgcggcggcgggggagagcagggccatcatatcgtcgcggctgagctgtttggccgccagggcgcgttcaacgtcggcgggagttttcccgttgattcgcaggcgaatatcgtcccagtccagctgccgccaacggtcagtgaaggtgttcatatccgcgcctccagaaagccggtcagcgggctggtggcctgcgcctgcgcgctgcgcgcgcccgggcctgcctgtcgggccagcaagccggcatcgattgctaaacggaaggcccgcgccatggttaccggatcgtcggcaacggcgatggcggtattcaccagtaccgcgtcagcgcccatttccagcgcctgcgccgcgtgactcggcacgccaatacccgcgtcaacgactaccggcaccgtggcctgcgcgataataatctccagcattgctttggtttccagtccctgattggagccgatgggcgcgccgagcggcatcaccgccgcgcagcccgcttcttcaaggcgcttgcacagcaccgggtcggcgccgcagtagggcagcaccacgaagccttcccgtaccagaatctccgccgctttcagcgtttcgatcggatcggggagcagccagcgggcgtccggatgaatttccagcttcagccagtgggtgcccagcgcctcccgcgccaggcgggcggcaaataccgcctcttccgccgttttggcgccggaggtgttgggcagcaggctaacgccggccgccagcagcggcgcgaggatcgcgtcattatgctgacggagatcgacgcgcttcatcgccagcgtcaccagctggctgccggaggcgcgaatggcctccaccatgacgtcgggggcggcgaatttaccggtgccggtgaaaagatgtgactcaaaggttttatccgcaatacgtaacatgtcagcctccagcgataacctgaaaaagcaggatttgatcgccttcctgtaagagatgatcttgccactgttcatgcggcaggatgcgttgattgagcgccagcgcgacgcccggctgctgctgttccagctgcgtgagcagatcggcgacggaggtcgcttcggcgcactgcaacggttcatcgttaaaccatatccgcatgctgccctccgcataccggacagccctgagcccgctggagcgcgagagtgcgccagctgctggttcgggcatcgaacaggcgcagcgtgttccgcggggccatcatgccggcgagcagcttgatggcctccagcgcctgtagggtacccatcatgccaaccaccggaccgataatgcccgccgtacggcagttgcgctcaggctcgttagcgtccggccacagacagcgatagcagccctgctcccacggcggcgtcagtaccatcagctgccccccaagcccgacggcactggcggtaatcagcggcgttttaagcgcgacgcaggcggcgttgatcgcctgacgagtcgccatgttatcggtgcaatccagtaccacatcggccttcgccacttcatcccgcagggcctttccgcctaaccgctgcttcagcgcaatcagttcaatctgcggatttaactgagccaaccgggccctggcggccgtggttttaggctgagcgatatcctcgctggtgaacaaaatttgtcgctgcagattactgacgtgcacgtcgtcgtcgtcgaccagcaccagcgtgccgacgccagctccggcaagatagagcgcggcgggagagcccagcccgccgaggcccacgatcaacacccggctggccagcagcttttgctggccttcaatggcgatatcctccagcagcagctggcggctatagcgcataaaatcgctgtcattcatcaccggctcccgctatctcgagcagccggaccgttgcctgtcgccagtcggccgcctgagtaatggcgctgaccaccgcaacgctgccgacgccggtcgccagtaccgccggggcgcgctcaaggctgatgccgccaatcgccacggttggataatccccgagtcgctgaatatgctgcgccagctgatccagcccctgaggggcggaaggcatctgcttggtttgcgttggaaaaacgtgcccaagcgcgatgtaagagggacgcgccgccagcgcgatatcaatttccatatcgtcatgcgtcgaaacgccaaggcgtagcccggcgttgcggatggcgctgaggtcggtcgtttccagatcctcctggcctaaatgcacgccgtaagcctgatgtttgatggccaggcgccagtaatcgttaataaacagccgcgcatggtatttgcgtcccagagcgatagcggcaacgacatgctcttcaacctcactatcgcgtttatccttgatgcgcagctggagagtgcgaacgcccgcggccagcaggcgttcgatccacgtgacgctatcgacgaccggatagagccctaaacggaaagggacggatggaaaatcgggttgatacatcaggcttcctccttacgtagatagatttcactgccgcgggcgcggaagttatccgacatatcggccatccccacttcgatggtctgcgcggcggcgtagtcgcgaacttcctggcttatcttcattgagcagaatttagggccgcacatggagcagaagtgggccactttgcctgactcctgcggcagggtttcgtcgtggtaagcgcgcgcggtgaacgggtcgagcgccagattaaactgatcttcccagcggaactcgaagcgcgctttcgacatggcgttatcgcggatctgcgcgccgggatggcctttggcgagatcggcggcgtgggcggcaattttgtaggtaatcaggccctgcttaacgtcttctttattcggcaggccgaggtgctcttttggcgtcacgtagcagagcatcgcgcagccgaaccagccgatcatggcggcgccaattcccgaggtgaaatggtcatagcccggcgcgatatcggtggttagcggccctaaggtgtagaacggcgcttcgtggcagtgctccagctcttcggtcatattgcgctgaatcatctgcatcggcacgtggcccgggccttcgatcatcacctgtacgtcatactcccaggctattttggtcagttcgcccagggtgtgcagttcggcgaactgcgcttcgtcgttggcatcctgaatcgagccgggacgcaggccgtcgcccaatgacagcgagacgtcataggcggcgcagatttcgcagatttcgcggaaatgctggtagaggaaattctctttgtgatgggacaggcaccatttcgccatgattgagccgccgcgggagacgatgccggtcaggcgcctggcggtcatcggcacgtagcgcagcagcacgcccgcatggatggtgaagtagtccaccccctgttccgcctgctcgagcagcgtgtcgcggaaggcttcccaggtgagatcttcggcgatcccgctgaccttctccagcgcctggtagatcggcaccgtaccgatcggtaccggactattgcgcaggatccactcgcgggtctcgtgaatatagcggccggtggagaggtccatgaccgtatccgctccccagcgcgtcgcccacaccagcttctcgacctcttcttcaatcgacgaggtgaccgccgagttgccgatattggcgttaaccttcacgaggaagttgcggccaataatcatcggttcggattccggatgattaatattggccgggataatcgcgcgcccggcggcgacttcagcccgcacaaactccggggtgatattctccggcagccgcgcgccaaacccaacgcccggatgctgctggcgcagcacttcgccacgaatacgctcgcggcccatattctcgcgaatggcgatgaactccatttccggggtgacaatcccctgacgggcgtagtgcagctgcgtcacgcatttcccgacgatggcgcgcctgggcgtgagcaggccggtaaagcgcagttcgttgaggccatcatccgccagccgctctctggtataggccgagctgcgatcgctgagtgcttcgcagtcgcggcgcgcatcaatccacggctgacgcagctttgccagaccctgctgaacgttaatcgcgacgtgcggatcgccataggggccggaggtgtcatagaccggaatagcttcgttcgcttcgtactgaggattatctttgctgccgccgataagcgtcgggctcagctgaatttcgcgcatcggtacgcgaatatcttcctgcgaaccggggatatagatgcgctgcgaattgggaaatgcggtaccttccagggtgtcgataaagcgctgggcgcgttcgcgttgctctcgacgcgtgagtttggttgtagacatagctcattccagttaaacaggatatggcttgccagacgacggatggagtaacggatgcgatcggccctgaagaggctgatgctaaacgcagtttactcttgttcccttcgcaggtattagcctgatcaggttccgcggatcccgaattaacggtctcagccttttccagtgtggaaaatgggcactccgacaagatgacatcccctctccgtgaggggggaatgtatgtaaactacgcgttaatggctcacaactcaagcggtcggcgcgatattgtcgctgacgttgtctttgcggctgtgggcgacggcgagggcgatcaggttatcttccagcgcaaagcgcgcttccagcgcttcgccgatgtccgacagcgcctgctggaactcaaggtagttatcgtgatcgatggcgttttcgaggcaggagtcgtaataatccatgatctgctgggtattagcctgcagctgtggataaatcttagtggcggctaaaagtggcgtattgccttccaattcgccgataaagcgttcataaatattaaaatggccggaggagaggtagtccaccaggctttgacaaaaatcatccagcgctttctcattaagccgcataaatgattctttgccgggcttcaggccaaccaggttgtagtaagccacaagcaaatgcttacgtacttgtagccagcgatcgaccagtttattgctgcctccaacacgttccgtcaggttttccagctggtttaacatggttgactccgcaaggttttaagagaaatacgttgctcaccaaaatgtaaatttaatgttaaaagtgccagtaaaataaaggtagtgcaatagatatggatcgtattattgaaaaattagatcgcggctggtggatcgtcagccacgaacagaaattatggttgcccgacggagaattgccctacggcgaagcggtaaattttaatcttgcggggcagcccgcgctgcgaatcggagaatggcagggcgatccggtgtggctggtccgccaggatcgccggcatgagatgggatcgctgcgtcaggtgctcgatcaggatgctggcctttttcaactggcggggcgcgggatccagctggcggagttctaccgatcgcataaattctgcggctactgcggtcatcctatgcaccccagcaaaaccgagtgggcaatgctgtgcagccactgccgcgaacgctactacccgcaaatcgccccgtgcattatcgtcgccatccgtcgggatgattctatcctgctggcgcagcatactcgccatcgcaacggcgtgcatacggtgctggccgggtttgtcgaagtcggcgaaaccctggagcagaccgttgcccgcgaggtgatggaggagagcggcattaaggtgaaaaacctgcgctacgtgacctctcagccctggccgttcccgcaatcgctgatgaccgcgtttatggccgagtacgatagcggcgagattgtcatcgacaagaaagagctgctggaggcgggatggtatcgctatgacaatctgccgcttttgccgccgccgggcaccgtggcgcgccgtctgattgaagataccgtggcgatgtgtcgggcagagtatgagtgacatgttacatacactttatccttcaaattgcctctttgttggctgctttcacttaccccagtcacttacttgagtaagctcctggggttcattcaattgccgcctcgatccactttgaatgattttgtgtataaacttggcgcatcaacgctaaaggaatgtaaaaatgaccgaactgaagaacgatcgctacctgcgcgcgctgctacgccagccggttgatgtcaccccggtatggatgatgcgacaggcgggccgctatttaccggaatataaggccacccgcgccgaggcgggcgattttatgtcgctgtgtaaaaacgccgagctggcctgtgaagtgacgctgcagccgctgcgccgctataagctggatgcggctatcctcttctcggacattctcaccatcccggatgcgatggggctggggctctatttcgaagccggggagggcccgcgttttacctcacccattaccggcaaagcggatgtcgataaattacccgtacccgacccggaagatgagcttggctacgtgatgaacgccgtgcgcaccatccgccgtgagctgaagggagaagtgccgctgattggcttttccggcagcccgtggacgctggcgacctacatggtggaaggcggcagcagcaaagcgtttacggtgatcaaaaagatgatgtacgccgagccgcaggccctgcatgcgctgctcgataagctggcgaaaagcgtcacgctgtatctgaatgcgcaaatcaaagcgggcgcgcagtcggtgatgatttttgatacctggggcggggtgctgaccggccgggattatcagcagttctcgctctattacatgcataaaatcgttgatgggctgctgcgtgagaacgatggccgccgcgtgccggtgacgctgtttaccaaaggcggcgggcagtggctggaagcgatggcggaaaccggctgcgatgcgctgggactcgactggacgaccgatatcgccgatgcgcggcgtcgcgtcggccataaagtcgccctgcagggcaatatggatccctcgatgctgtatgcccctccggcgcgcatcgaagaagaggtggcgaccattcttgccgggtttggccagggcgaaggccatgtctttaacctcgggcacggcattcatcaggacgtcgacccggaacatgcgggcgtatttgtggaggcagtgcaccggttgtcggcgccataccaccgttaaggagtgaatatggatttgtcatcgctacgcacccagcagctcagcctggcggcatcggttgaacgaggcgatcggctggaccaggatccgctgacgctgatcggcggagcggatgttggatttgagcaagagggagaggtgacccgggcggcgatggtgctgctgagctatccgtccctggagctggtggagtatcaggtcgcgcgcgtcgcgaccacgatgccctatatccccggattcctctcctttcgcgaaacccccgcgctgctggcggcctgggagcagctttcgcagaagccaaatctcttatttgttgatggccacggtatttcccacccgcgccgcctcggcgtcgccagccattttggtctgctggtggatgtgccgactatcggcgtggcgaaaaaacggctgtgcggtaagttcgagccgctgggcgatgagcccggcgcgctggcgccgttgttagataaaggcgagcagctggcgtgggttttgcgcagtaaaacgcgctgtaatcccctgtttgtgagtaccgggcaccgcgtgggcctggatagcgcgctgatgtgggtggagcgctgtctgaaaggctaccgcctgcccgagccgacgcgctgggctgatgccgtggcgtcccggcgtccggcgtttgtgcgttggcaagcaaatcacgattgattcaggtacactgcggctaatttctgacttcgagatttcatcatgttacaaaacccgattcatctgcgtctggagaagctggaaagctggcagcacgtgacctttatggcctgcctgtgcgagcggatgtaccccaactacgccatgttctgtcagcaaactgagttcgccgatggccagctttatcgccgtattctcgatctgatctgggaaacgctgacggtaaaagatgcgaaggtgaattacgacagccagctggaaaagctggaagaggcgattccggccgctgatgattacgacctgtacggcgtctatccggccattgatgcctgcgtggccttgagtgagctgattcattcgcggctgagcggcgaaacgctcgaacatgctattgaagtcagcaagagctcgatcaccaccgttgcgatgctggaaatgacccaggctggtcgcgaaatgaccgacgaagagctcaaggaaaacccggctgtcgaacaggaatgggatattcagtgggagattttccgtcttctggccgactgtgaagaacgcgatattgaactgatcaaagggctgcgtgcagaccttcgcgaggccggtgagagcaatattggtataaattttcagcaatgagaccagaaaacgtgatttaccgcctgaattgtagcgtctgaaggcatccattccgccccccgtctggtctacatttggggggcgaaaaaacgtggctatcggtgcgtgtatgcaggagagtgcttttcaggcatttccgtcgcactcgatgcttagcaagcgataaacacattgtaaggataacttatgaacaagactcaactgattgatgtaattgcggacaaagctgacctgtccaaagcacaggcgaaagctgccctggaatctaccctggctgcaattaccgagtctctgaaagaaggtgatgctgttcaactggttggtttcggtaccttcaaagtgaaccaccgcgctgagcgtactggccgcaacccgcagaccggtaatgaaatcaaaatcgccgcagcaaacgtaccggcatttgtttctggtaaagctctgaaagacgcagttaagtaagaccgcgtggcagtgtacagttttatcgaaggggcttgtcggccccttttgtctacctggcgccgcacgctggcgctggtaggcgtattgctgctcactgcctgcagccatgattcctctctcccgccgtttaccgccagcggatatgcggataaccagggggcgatgcgtatctggcgcaaagattctaacggcgaggtccatctccttgccgccttcagtccatggcgtcatggtaatacttcgaccagcgagtaccgctggcaggatggccagctcgcgctgattgaactcaacgtctacggtaaaccgccggaacatattcgcgcccggtttgatgcgcagggcgaactcagctttatgcagcgtgaaatcgatgggcagaagcagcagctttccagcgatcaggtcgcgctataccgctatcgcgctgagcaaatacgccagaccagcgacgctctgcgtcagggacgcgttatgctgcgccaggggcgctggcatgccaacaggacggtgaccacctgtgaaggtcagaccgtgaagcctgacctcgatacgcaggcgctggcgcatattgagcgacgccagaatcactcatccattgaggtcagcgtggcgtggctggaagcgcctgaaggctctcagctgctgctggtggcaaacgaagatttctgcacctggcagccgaccgaaaaaagcttctgagccttaccagtggctcatccccatatgaccgcggcctccgtcgcagcttcctggtcccatacccacaccgcgagaaatacccgcctgcgctaacgcgagatcgaacttaacccgctgctgggccagctgttgaccgagaacctccatctcctgggcaatggattcgactttcgcgctatcaggcttatccgcggttaacagcgcatggtattcgtagcgttttgattgaagctgctgacgcaaaacgcgggtttgttcatagaaatcgttatgcagcttccgggcagtggcctgctgatcggcggtgagctggctgtagccctgggggcccattccgctgccgttattccagtggtgccttgcccaggctgaactgctgccgaaagtcagcgcggcgagggcaatcagcgtcagcgtcatttttttgttccgtttcatagtttattctcctggcttatggttactcaatgatttgcatcttctgtgccagaatggaaaggccgcaggatatcgggcattgagcgttttccagccggacgagagcgagtaaaaatgactcgcggtcaaggaggctgtgggtcatttttactcgatcgccttcccggtttgcgcctgagaagcggttagacgggacggaaaaatggcatgatttctgctgagcgatacggtgtctgaggaaagggagttgtcatgaacgcgatgcggttgtctaaggattccgtcgccgtctggctgagctggttgttaaccggccttatcttgctgctggtgtgcctgttctctgcgttaatcgtgcgtgattatggccgtgaaaatgaagccgcgcgccagactatccaggaaaaaggcagcgtgctgattcgcgcccttgagtccggcgcccgggtgggcatgggaatgcgtatgcatcattcccaactgcaggcgttgctggaggagatggcctggcagcctggcgtgctgtggttcgctgtgacggatgagagcggtaaaatcattgcccatagcgacccgcggcgggttggtgagtcgctctatcctgccagcactctgcgtgagctgaatattgggagcgaggagcgctggcgccggctcgaaaaaccggaaccggcgctggagatttatcgtcaatttcgcccgcttaacggcggcgggcatcatatgcgcatgatgatgcgtcgcgaagctgccgggctacgtacccaggctccccaggttatttttattgcttttgatacccgcgagctggatgccgaccatgcccgtagcctgcgtaatatggttatcatgctctgcgcggcgggcgtagtgatggcggcaacgttgctggcgcagttctggttccgccgctatcaacgttcgcgcaagcagctgcaggaggcgacggcgcgtaaagaaaagctggtggcgcttggtcatctggccgcgggcgtcgcccatgagatccgcaacccgctgtcatctataaaagggctggcaaagtattttgccgagcgaaccccagccgatggcgaagcgcatcagctggcccaggtgatggcgaaggaagccgatcgcctgaacagggtcgtcagcgagctgctggaactggtgcgtccggcgcatttaacgtatcaatcggttgatttgaatgacgtgattacgcactcgcttcagctaattagccaggatgccgccagccgggcaataacgctcgcgttcaccgcgcagcccgcgctatgccgcattcaggccgatccggatcgtttgaaacaggtgctgctgaacctttatctcaatgccgtccacgctattggccgcgatggcgtgattacggtggcggtgagggaatgcggcgacgggcgagtaaaggtgagcgttgcggacagcggcaaggggatgacggcggaacagctacaggccatttttactccgtacttcacgaccaaggccgacggcaccgggctgggcctggcggtggtgcagaacattgtcgagcagcacggtggaacgattcacgccgagagcgcccccggcgaaggcgcgctatttactctctatttgccggtcaacgggcaacaaaaggatgaacaaggatgagtggcgagcagatcgatattctggtggtggacgatgatatcagccactgcactatcttacaggcgctgttgcggggctggggataccgggttgcgctggcctacaacggtgtacaggcgctggaacaggtgcgccagacggtgtttgatctggtgctttgcgatatccgcatggccgagatggacggcatcgaaacgctgaaagagatcaaaacctggaatccgtcgattccggtattgatcatgaccgcgtactccagcgccgataccgcagtggaggcgctgaaatccggtgcgctggactaccttatcaagccgctggactttgacaagctgcagcagacgctgtctgaggcgttggcccatacgcggctgagcgagtcacccgtcgcgggtagcccccccgcggcccagtttggcatggtgggcgatagcccggcgatgcgggcgctgttgaataatattgccctggttgccccctccgatgcgacggtattaattcacggcgagtcgggcaccgggaaagagctggtcgcgcgggcgctgcacgccagcagcgcccgcagccgcaggccgctggtgatcctcaactgtgccgcactcaacgagtcgttgctggagtcggagctgtttggtcacgagaaaggcgcctttaccggcgcggacaaacggcgagaagggcgttttgttgaagcggacggcggtacgctctttctcgatgagattggcgatatttcaccgctgatgcaggtgcgcctggtgcgggcgattcaggagcgtgaagtgcagcgcgtgggcagcaatcagaccctttcggtcgatgtgcggctaattgccgccacccaccgggatttagctgaagaggtcagcgccggacgttttcgtcaggatctctactatcgcctgaacgtcgtgactatcgatatgccgccgctgcgtcagcgcaaggaagatatccctcagctggcgcgctatttcctgcagcgttatgccgagcgtaaccgcaaagcggtgcaggggtttacgccgcaggcgatggacttactgattcactacgcatggccggggaatattcgcgaactggaaaatgcggtagagcgggcggtggtcctgctgaccggagagtatatctcggaacgcgagctgccgctggcgattgccggtacgtcggtttcggacgcgccgcacggtgaggatattattcagccgctggtggaagtcgagaaagaagcgatcctggtggcgctcgaaaaaacgggcggcaacaaaactgaagccgcccgtcagctgggcattacgcgcaaaacgctgctggcaaagctcagccgttagctgttttgctcacgttcaatagcgcgccagccgatgtcgttacggctaaagctgccgtcccagcggatatcgctcatcagggcgtaagcgcgcttttgcgcttcagcgacggtgtgacccagcgcggtagcgcagagcacccggccgccgctggtcagcacgcgatcgtcatcagcgagtctggtaccggcgtggaagaccttgccgtcagccgcttcttccagcggcaggccgtggatctcatcaccggtgctgtagttgcccggatagccaccggcggcgatcacgacgcccagcgaggcgcgttcgtcccactcggaggttttctcattcagcttgccgtcgcaggcggcgaggcacagatctaccagatccgatttcatacgcagcatgatcggctgggtttccggatcgccaaagcggcagttgaactcgataaccttcgggtttccctgtttatcgatcatcaggcccgcatagaggaaaccggtgtaggtgttcccttccgctgccataccttttacggttggccagataatgcgttccatggtgcgctggtgaacctcatcggttaccaccggcgccggtgagtaagcgcccataccgcccgtgtttgggccggtatcgccattgcccacgcgtttatgatcctggctggtggccatcggcaggacgtgctcgccgtcgaccatcacgataaagctcgcctcttcgccgtcgaggaactcttcaatgacgatgcggtgtccggcgtcgccaaaggcgttacctgccagcatgtcgtgaacggcggcttccgcttcttccagcgtcatggcgacaatcacgcccttgccggcggccaggccgtcggccttgatgacgatcggcgcgcctttctcacgcaggtacgccagcgcgggctcgacttcggtgaagttctggtattccgccgtcgggatgttatgacgcgcgaggaaatctttggtgaaggctttggagccttcaagctgcgccgcgccttccgttgggccgaagattttcagccctgcggcacggaacgcatcgacaacgccaattaccagcggcgcttccgggccaacgatggtcaggtcaatcttctcgctctgcgcaaagctcagcagcgccggaatatcggtgacgccgatagccacgttctgcagcgccggttccagggcggtgcccgcgttacccggggcgacaaaaacggtatcaacctgcggtgactgtgcggctttccaggccagcgcgtgttcgcgtccgccgttgccaataactaatactttcatcgtctgctccgtgaattaatggcggaagtggcgcatgtcggtgaagatcatcgcgatgccgtgctcatcggcggcggcaatcacctcttcgtcgcgaatagagccaccgggctgaatgacgcagctcacgccaacggcagcagcggcatcaataccgtcgcggaacgggaagaaggcgtcagaggccatcgccgaacctttcacttccagaccttcatcaccggctttaatcccggcgattttggcggagtaaacgcggctcatctggcctgcgcctatcccgatggtcatattctctttggcgtacacaatggcgttggatttaacgaatttcgccactttccagcagaacagcgcatcgcgcagctcctgctcggtcggctggcgtttggaaaccacgcgcagttcgccttccgtaaccatacccagatcgcgatcctgaaccagcaggccgccgttaacgcgtttgaagtccagacccggtacgcgctgcgtccactgaccgcaggtcaggacgcggacattctgtttcgcggcagtgatcttcagggcttcttccgtcgcagacggtgcgatgatcacttcaacaaactggcgggagatgatcgcctgcgcggtttcggcatccagttcgcggttaaaggcgataatgccgccgaaggcagaggtcgggtcagttttgtacgcgcggtcgtaggcatccagaatagaggtacttaccgctacgccacatgggttggcgtgcttcacaataacgcaggccggctcgctgaattctttgacgcattccagcgcggcatcggtgtcagcgatgttgttataggagagcgctttaccctgaacctgctgtgcagtggcgacagaggcttctttgacttcttcttctatatagaaggccgcctgctggtggctgttttcaccatagcgcatatcctgcttcttaacgaagttcagattcagggtgcgcgggaagcgacccgcggcttctttgctctcgccgtgataggccggaaccatgctgccgaagtagttggcaatcatgctgtcgtaggcggcggtgtgttcgaatgccttaatggcgaggtcgaagcgggtgtcgagggtcagggagccttcgttggcatccatctctttaataatggcatcgtagtcgctgctcttcaccacgatggcgacgtctttatggttcttcgccgctgagcgaaccatggttgggccgccgatatcaatgttttctaccgcatcttccagcgagcagccctcgcgggcaacggtttgagcaaacggatacaggttaaccaccaccatatcaataggcgcgataccgtgttgttccataataccgtcatcctggccacggcgaccgagaataccgccgtgaactttcggatgcagggtcttcacgcgtccgtccatcatttccgggaaaccggtgtagtcagagacttcggtaaccggcagacctttctcagccagcaggcgtgcggtaccacccgtagacagtagctcgacaccacgagcggaaagcgcctgcgcgaattcgacgataccggccttgtcagaaacactgagcagggcgcggcggactggacgacgttgttgcatggtattaaatccccaggatttgaatattacagagagcgttaggtgaatttttgtctaaaaactcacctaacgcacccaaccgggcatccttgttatagcgcggcattgtaacgaaaacgtttgcgcaacgctcgcgaatttttatctttctctttttatcccaggatcgcgccctatagagagaagagagcgggcctttataagagggtatcggccgccacctgtggataattctgtgcgtaacagggtataaagcggggttttgctggggaatgcagcagtcagtcatttttctgcaattttactattgcggatgctcgggaactccctataatgcgcctccatcgacacggcagatgtgaatcacttcacaaacaacacggtcggttgaagagaaaaaatcctgaaataacgggttgactctgaaagaggaaagcgtaatatacgccacctcgcaacggtgagcgaaagccgcgttgcactgctctttaacaatttatcagacaatctgtgtgggcactcaaagtgacatggattcttaacgtcgcaagacgaaaaatgaataccaagtctctgagtgaacatacgtaattcattacgaagtttaattcacgagcatcaaacttaaattgaagagtttgatcatggctcagattgaacgctggcggcaggcctaacacatgcaagtcgaacggtagcacagagagcttgctctcgggtgacgagtggcggacgggtgagtaatgtctgggaaactgcctgatggagggggataactactggaaacggtagctaataccgcataacgtcgcaagaccaaagagggggaccttcgggcctcttgccatcagatgtgcccagatgggattagctagtaggtggggtaacggctcacctaggcgacgatccctagctggtctgagaggatgaccagccacactggaactgagacacggtccagactcctacgggaggcagcagtggggaatattgcacaatgggcgcaagcctgatgcagccatgccgcgtgtatgaagaaggccttcgggttgtaaagtactttcagcggggaggaaggtgttgaggttaataacctcagcaattgacgttacccgcagaagaagcaccggctaactccgtgccagcagccgcggtaatacggagggtgcaagcgttaatcggaattactgggcgtaaagcgcacgcaggcggtctgtcaagtcggatgtgaaatccccgggctcaacctgggaactgcattcgaaactggcaggctggagtcttgtagaggggggtagaattccaggtgtagcggtgaaatgcgtagagatctggaggaataccggtggcgaaggcggccccctggacaaagactgacgctcaggtgcgaaagcgtggggagcaaacaggattagataccctggtagtccacgctgtaaacgatgtcgacttggaggttgttcccttgaggagtggcttccggagctaacgcgttaagtcgaccgcctggggagtacggccgcaaggttaaaactcaaatgaattgacgggggcccgcacaagcggtggagcatgtggtttaattcgatgcaacgcgaagaaccttacctactcttgacatccagagaacttagcagagatgctttggtgccttcgggaactctgagacaggtgctgcatggctgtcgtcagctcgtgttgtgaaatgttgggttaagtcccgcaacgagcgcaacccttatcctttgttgccagcgattcggtcgggaactcaaaggagactgccagtgataaactggaggaaggtggggatgacgtcaagtcatcatggcccttacgagtagggctacacacgtgctacaatggcatatacaaagagaagcgacctcgcgagagcaagcggacctcataaagtatgtcgtagtccggattggagtctgcaactcgactccatgaagtcggaatcgctagtaatcgtggatcagaatgccacggtgaatacgttcccgggccttgtacacaccgcccgtcacaccatgggagtgggttgcaaaagaagtaggtagcttaaccttcgggagggcgcttaccactttgtgattcatgactggggtgaagtcgtaacaaggtaaccgtaggggaacctgcggttggatcacctccttaccttaaagaacctgcctttgtagtgctcacacagattgtctgatagatgtaaagaagcaagacggctgcgaagtcgcgacacctcgtgtccccttcgtctagcggttaggactccgccctttcacggcggcaacaggggttcgaatcccctaggggacgccacttgctggctgtgagtgaaaggcacaaccaaccgatatctcaaaactcatcttcgggtgacgtttgagatatttgctctttaaaaatctggatcaagctgaaaattgaaacgacacacagttaatgtgtgttcgagtctctcaaattttcgcgacacgatgatgttttacgaaacatcttcgggttgtgaggttaagcgactaagcgtacacggtggatgccctggcagtcagaggcgatgaaggacgtgctaatctgcgaaaagcgtcggtaaggtgatatgaaccgttacagccggcgatgtccgaatggggaaacccagtgcaattcgttgcactatcgttaactgaatacataggttaacgaggcgaaccgggggaactgaaacatctaagtaccccgaggaaaagaaatcaaccgagattcccccagtagcggcgagcgaacggggagcagcccggagtctgaatcagcttgtgtgttagtggaagcgtctggaaagtcgcagggtacagggtgatactcccgtacactaaaacacacaggttgtgaactcgaagagtagggcgggacacgtggtatcctgtctgaatatggggggaccatcctccaaggctaaatactcctgactgaccgatagtgaaccagtaccgtgagggaaaggcgaaaagaaccccggcgaggggagtgaaaaagaacctgaaaccgtgtacgtacaagcagtaggagcccactggttgggtgactgcgtaccttttgtataatgggtcagcgacttatattctgtagcaaggttaaccgtataggggagccgcagggaaaccgagtcttaactgggcgttaagttgcagggtatagacccgaaacccggtgatctagccatgggcaggttgaaggttgggtaacactaactggaggaccgaaccgactaatgttgaaaaattagcggatgacttgtggctgggggtgaaaggccaatcaaaccgggagatagctggttctccccgaaagctatttaggtagcgcctcgtgaactcatcttcgggggtagagcactgtttcggctagggggtcatcccgacttaccaacccgatgcaaactacgaataccgaagaatgttatcacgggagacacacggcgggtgctaacgtccgtcgtgaagagggaaacaacccagaccgccagctaaggtcccaaagtcatggttaagtgggaaacgatgtgggaaggcccagacagccaggatgttggcttagaagcagccatcatttaaagaaagcgtaatagctcactggtcgagtcggcctgcgcggaagatgtaacggggctaaaccatgcaccgaagctgcggcagcgacactatgtgttgttgggtaggggagcgttctgtaagccgttgaaggtggcctgtgagggttgctggaggtatcagaagtgcgaatgctgacataagtaacgataatgcgggtgaaaaacccgcacgccggaagaccaagggttcctgtccaacgttaatcggggcagggtgagtcgacccctaaggcgaggccgaaaggcgtagtcgatgggaaacaggttaatattcctgtactcggtgttactgcgaaggggggacggagaaggctatgttggccgggcgacggttgtcccggtttaagcatgtaggcggatgttccaggtaaatccggagcgtcactaacgctgaggtgtgatgacgaggcactacggtgctgaagtgacaaatgccctgcttccaggaaaagcctctaagcatcaggtaacatcaaatcgtaccccaaaccgacacaggtggtcaggtagagaataccaaggcgcttgagagaactcgggtgaaggaactaggcaaaatggtgccgtaacttcgggagaaggcacgctgatggtaagtgaagtgacttgctcatgaagctgaaatcagtcgaagataccagctggctgcaactgtttattaaaaacacagcactgtgcaaacacgaaagtggacgtatacggtgtgacgcctgcccggtgccggaaggttaattgatggggttatcctcgcggagaagctcttgatcgaagccccggtaaacggcggccgtaactataacggtcctaaggtagcgaaattccttgtcgggtaagttccgacctgcacgaatggcgtaatgatggccaggctgtctccacccgagactcagtgaaattgaactcgctgtgaagatgcagtgtacccgcggcaagacggaaagaccccgtgaacctttactatagcttgacactgaacactggtccttgatgtgtaggataggtgggaggctttgaagtgtggacgccagtctgcatggagccatccttgaaataccaccctttaatggctggtgttctaacgtgggcccctgatcggggttgcggacagtgtctggtgggtagtttgactggggcggtctcctcctaaagagtaacggaggagcacgaaggtcagctaatcctggtcggacatcaggaggttagtgcaatggcataagctggcttgactgcgagcgtgacggcgcgagcaggtgcgaaagcaggtcatagtgatccggtggttctgaatggaagggccatcgctcaacggataaaaggtactccggggataacaggctgataccgcccaagagttcatatcgacggcggtgtttggcacctcgatgtcggctcatcacatcctggggctgaagtaggtcccaagggtatggctgttcgccatttaaagtggtacgcgagctgggtttagaacgtcgtgagacagttcggtccctatctgccgtgggcgctggagaattgaggggggctgctcctagtacgagaggaccggagtggacgcatcactggtgttcgggttgtcatgccaatggcattgcccggtagctaaatgcggaagagataagtgctgaaagcatctaagcacgaaacttgccccgagatgagttctccctgaccctttaagggtcctgaaggaacgttgaagacgacgacgttgataggccgggtgtgtaagcgcagcgatgcgttgagctaaccggtactaatgaaccgtgaggcttaaccttacaacgccgaagatgttttggcgatttgagaagacaacaatttcagcattgattacagattttcgggaacgaaagattttacgctgaggcaaggcggcaaatgaagtaaaggaaggagcatactgtagtatgtgactgactttacgaatgcagccaacgcagcatcggtgtaaaagattcgtttctgacaacagaatttgcctggcggcactagcgcggtggtcccacctgaccccatgccgaactcagaagtgaaacgccgtagcgccgatggtagtgtggggtctccccatgtgagagtagggaactgccaggcatcaaacaagtgaagagcccatcctgacggatgggctttttgcgtttttgtcgtctgaaccgaccggacatcggttatccttatccagtcttacttcattactcatgtaccaaattcaataacggatagggtttgccaagatcgtccgtctcagaacggcctgtcaccttaaagcccatcttcttataaaatccgaccgcttgttcattctgctcattaacgttggtcgtcagtttgggcgctaacgtcagcgcgtgttcaatcaacagcttacccacgccgcagccgcggaccgtagggtcaacgaatagcgcatccatatgttcccccgtaagtagcataaaggcgaccggctcgtctttctccgtcaccgcgacccacagcggcgcttcgggtaaaaacgcgctcaccagatcttccagttccgctctatactcttttgataaaaaatcgtgcgttgcatcgaccgaccgacgccagatcgcaatcagttttttcccttcatcatgccgtgaacggcggatactaataaccatatttgctccttttctttgttcttatattctaactcaaatgtctccgtgaaattttctcaccctgcacctgcaggctcgacattcaccttattcctgggtatcttcagctgtctggatgtctaaacgtttatacgtatgctatgaggtaataaagttatgccaattcgggtgcaggacgagctaccggccgtcaatttcttgcgtaatgaaaacgtctttgtgatgacgacaactcgcgcgacgactcaggaaatccgcccgctgaaggtgctcatccttaatctgatgccgaagaaaatcgagactgagaatcagtttttgcgactgctttccaactctcctctgcagcttgatatccagctgctgcgcatcgatgcccgcgaatcacgtaatacgccggcggaacacctgaacaacttctactgcaactttgaagatatttgcgatcagaactttgatggcctgattgttaccggtgcgcctttaggtttggttgaatttaatgacgttgcctactggccgcagataaaacaggtgctggaatgggctaaagatcatgttacctcaacgctgtttgtctgttgggcggtacaggcagccctcaatatcctctacggtatccctaaacagacccgctctgagaagatttccggggtctacgaacaccatatcgtgcaacctcatgccttgttaacccgcggctttgacgatagctttctggccccgcactcgcgctatgccgatttcccggcggcgctgatacgcgactacaccgacctcgagatcctggcggaaacagaagagggcgacgcctacctgttcgccagcaaagataagcgcatcgccttcgtgaccggtcacccggaatatgacgcgaacaccctggccagcgaattcttccgcgatgtggaagcgggtctcgatccgcaggttccacataattatttcccgcagaacgatccgcagaacaaaccgcgcgccacctggcgaagccatggcaatttgctgtttatcaactggctgaattattacgtctaccagatcacgccatacgatctacgccatatgaatccgactctggattaatcttctacacaacgcgatcctaaagcgtttcagcattttgcctctggcaccttcgggtgccttttttatttccgaaatgcagctcatattgtaattaaactttatttatattgttatcaataggttaaatgataattaaattaaaaatggaaattgtttttgattttgaaaaataaatgcgtagtcttaattgtgctgaacgaaaactacacaacgatcttacgttcgcgccaactggatcaaccaagaggagcagcacatgacgcagcaggcgacaatcactgacgaactggcttttagccagccatatggcgaccaggagaagcaaatcttaacgcctgaggccgtagaatttctgaccgagctggtgcgccgctttacgcctgagcgcaataaactcctggccgcgcgtatccagcagcagcaggcaattgataacggcaagcttcccgattttatttcggaaacggattccattcgtagcggtgattggaagatccgcggcattccggacgatttgcaggatcggcgggtagaaattaccggtccggtagagcgcaagatggtcatcaatgcgctcaatgcgaatgtaaaagtctttatggcggatttcgaagactcactggcgcccgaatggagcaaagtcattgatgggcaaattaacctgcgcgatgcggttaacggcaccatcagctacaccaatgaagccggcaagatttatcagctgaagccgaacccggcgctgctgatctgccgcgtgcgcggtctgcatctgccggaaaaacacgtgacgtggcgcagggaagcgattcccggcagtctgttcgacttcgccctctatttcttccacaactacaaagcgttactggaaaaaggcagcggcccctatttctatctgccgaagactcaggcctggcaggaagccgcgtggtggagtgaagtatttagctttacggaagaccgttttgagctgccgcgcggcaccatcaaagccacgctgctgatcgaaacgctgcccgccgtattccagatggacgaaattctgcacgccctgcgcgaccatattgtgggtctgaactgcgggcgctgggactacatcttcagctatatcaaaacgctgaagaatcatccggatcgcgttctgccggaccgtcaggtggtgacgatggacaagcctttcctcagcgcctactcgcgattgttgattaagacctgccacaggcgcggcgcgtttgcgatgggcggcatggcggcctttattccgagcaaagatgccgagcgaaacaaccaggtgctgaacaaggtaaaagcggacaaatcgctggaggcgaataacggtcatgacggtacctggatcgcgcatcccgggctggctgacaccgcgatggccgtctttaacggcgtactgggcgagaacaaaaatcagctgtccgttacccgcgaagacgatgcgccgattaccgctgaacagctgttggctccctgcgagggcgaacgaaccgaagagggcatgcgcgccaacattcgcgtggcggtgcagtacatcgaggcgtggatttccggcaacggctgcgtaccgatttatggcctgatggaagatgcggcgacggcggaaatctcccgtacctctatctggcaatggatccaccatgagaaaaccctcagtaacggcacaccggtcaccaaagcgctgttccgccagtggctggccgaagagatgcgggtgattcaggacgaactgggcgagcaccgctacagcagcgggcgttttgatgaagccgctcgcctgatggaacagatcaccacctccgacgagctgattgatttcttaaccctgccgggctaccgccttctggcctaattcaccacacaacaatatggagcatctgcacatgaaaacccgtacccaacaaatcgaagaattaaacaaagagtggacgaatccgcgctgggaaggcattactcgcccatacagcgccgaagatgtggtgaagctgcgcggctcggtcaacccggaatgtactctggcgcagctgggcgcggcaaagatgtggcgactgctgcacggggaagcgaaaaaaggctacgtcaacagcttgggcgcgctgaccggcggtcaggcgctgcagcaggcgaaagcgggcattgaagcgatttatctttccggctggcaggtcgcagcggacgccaacctggcctccagcatgtatccggatcaatcgctctatccggcgaactcggtaccggccgtggtcgatcggatcaacaacagcttccgccgcgcggatcagatccagtggtctgcgggcattgagccgaacgatccgcgttataccgattatttcctgccgatcgtcgccgatgcggaagcggggtttggcggcgtgcttaatgcgtttgagctgatgaaatcgatgattgaggccggtgcagcggccgtacacttcgaagaccagctggcatcggtgaaaaaatgcggccatatgggcggcaaagtgctggttcccacgcaagaggcgattcagaaactggtcgccgcgcgtctggcggcggacgtcatgggcgtgccgacgctggtgatcgctcgcactgacgccgatgcggcggatttaattacctcagactgcgatccttacgatcgccagttcattaccggcgaccgtaccagcgaaggtttcttccgtacccatgccggtatcgaacaggccatcagccgcgggctggcctacgcgccctatgccgacctggtgtggtgtgagacctctaccccggaccttgagctggcgaagcgctttgccgacgcgatccacgcgaaatatccgggcaaactgctggcctacaactgctcgccgtcgtttaactggcagaaaaagctggatgataaaaccattgccagcttccagcagcagctgtcggatatgggctacaagtatcagttcatcaccctggccggtattcacagcatgtggttcaacatgttcgacctggcccacgcctacgcccagggcgaggggatgaagcactacgttgagaaggtccagcagccggagttcgcggcggctaaagatggctacacctttgtctctcatcagcaggaggtcggcaccggatacttcgataaggtcaccaccattatccagggcggagcctcatcagtcacggcgttaaccggctctacagaagaagatcagttctgataatttccccctctccctctctccgggggagagggatgggtgagggggaagagatgacgcgtggcctggaattattgattgctcaaactattttgcagggttttgacgcccagtacggtcgttttcttgaagtgacttccggcgcccagcagcgctttgaacaggctgactggcatgccgtccagcaggcgatgaagcagcgtattcatctctacgatcaccatgtcggcctggtcgtcgagcagctgcgctgcattaccgatggtaaaaataccgataccgattttttgctgcgggtaaaagaacactatacccacctgctgccggattaccctcgtttcgaaattgcggagagctttttcaattccgtttattgccggttgtttgaccaccgctcgctgacttccgagcggctttttattttcagctctcagccagagcggcgcttacgcgccatcccgcgcccgctggccaaagatttcttccccgagcgcggctgggacacgctattacgcaaagtgttatccgatcttcctctccgtctgccgtggcaaaacagcgcgcgcgatatcggttatatcaccgcttgcctgcaggaggcgctcggcagcgagctgctttcccgctcgtacctgcaggtggcgaatgaactgttttaccgcaataaggcggcctggctggtaggcaaactggttacgccgatggcgacgctgccttttcttctgccaatccatcgcaccgatgaaggcgaattgtttgtcgatgcctgtctgacgatgcatgccgaagccagcatcgtttttggcttcgcccgctcctattttatggtttacgcgccgctacccggcgcgctggtcgagtggctgcgcgagattctcccggggaaaaccaccgctgaactgtacatggcgattggctgccagaagcatgcgaaaaccgagagctatcgggaatacctgcactatatttcccgcagcgatgagcaatttattgaagcgccggggattcgcggcatggtgatgctggtgtttactttgccgggatttgatcgggtatttaaagtcattaaggaccgctttgcgccacagaaagagatgaccgccgcccacgtgcgcgcctgctatcagctggtcaaagagcacgaccgcgtgggaaggatggccgatacccaggagtttgagaacttcgtcctggagaaacggcaaattgcgcccgaacttatggccctgttacaaaccgaagccggagcgaaaattaccgatctcggcgatcggattgcgatcagccatctttatatcgagcggcggatggtgccgctgaatatctggctggagcaggtggacggtccggcgctgcgcgatgcggtagaggagtacggcaacgccattcgtcagctggccgccgccaacattttccccggcgatatgctatttaaaaactttggcgtcacgcgtcacggccgggtggtgttctacgattacgatgaaatttgctatatgacggaggtgaatttccgcgagatcccgccggcgcgctacccggaggatgaactcgccagcgagccctggtatagcgtctcgcctggcgatgtttttccggaagagtttcgccactggctgtgcgctgacccgcgcatcggaccgctatttgaagagatgcacgccgacctgctgcgcgccgactactggcgggagctgcaaacgcgtatccgcaacggccacgtggaagacgtctacgcctatcgccgccgtcagcgttttagcgtgcgctacggcgacctgaagcaggcgggatagccgatggcctgcttcaggctgcttcgataacggcaaattcttcgtacaccagctccatatccggcgcccaggtgccttcgcgttcaaagaatgcctgatgcgccgattgccagtaagcgaggctcaaatcaccttcgccctccagcgcggcgagctcagggctcatttcgttaaaacgaatgagcctgagggtcagggtgcgtatcacgcagacggctttccctttgccgtccagcacaatgtgatacgcccccggcgtcacgggcggctgctcctgctgatagctggtaagcgagccgcaggtgccgcgcttcttcccggcgataaccagggcagccagctcgtcggccagcgccggtgaatcgccgaaagaccagcagaaagcagaagggtatttatcctgccagtaggatttcagatcgctcatttagcgcactccgccgtaggccagcgtcacttctttcgccgctttaatcaccatcgcgccgaactcggtcacgcggtcatcggtaatacgggaaatgggcccggaaatggagatggcggcgaacggctcacgatgttcatcataaatgcacgacgctacgcagcgcaggcccagcgcgtgttcttcgtcatcaaacgagtagccgcgcttacgcgtctgggccaggtcctctttcagatgtaccggcgataccagggtggcatgggtataagcgtgcagaccttgacggtgcagcaggccggtaacctgctcttcgcttagctgcgacagaaacgcctttccggcgccggaagcgtgcatcggcagcttaccgccaatcggtgccgacatacgcatcagctgcgtacactgcacctgatcgataataatcgcctgatgatcgctctggtcaagcaccgcgaggttaaccgtttcaccggaatcttccatcagctgacgcaaaatcggatggacgatcgccaacagattacggctttgcaggaagctgctgccgacgacgaaagcatgggcgcccaccgaccagtggcccagctcaccgacctgacgaacaaaacccagctgctgcatggtcgtcagcaggcggtgagtcgtggagttaggcaggccggcctgctgggccagttcggtcagcgccacgctgccgtgggattcagcaatccattcgagcagcttcagtccgcgggtcagggactgaacttgcccgccggccggagcggcggcgggggaggcaggttttctgccgcgttttgcgggagcgggggtcgccatcgcgaactccttttttctgtatcgtggaaatgattttcgttttatttggcgataatgcaatcactacccgactgatcggatgagtgaagctgaacatgtctcatcttgcccgctgttctcttttccaccccttcggtttgtgccagtatggtctgttgagttttttcggtctggttgagcgttgtcgggagcgagtgtgagcagcaaagttgagcaactgcatcagcagttaaaagcacgtattttggttctggatgggggcatgggcaccatgatccagagctatcgtctgagtgagcaggactttcgcggcgagcgctttgccgactggccgtgcgacctgaagggcaacaacgacctgctggttctcagcaagccggatgtgataaccgctatccacgatgcctattttgcggccggggcggatatcattgaaaccaacacctttaactcgacgaccatcgcgatggcggattaccagatggaatccctgtcggcggaaatcaactttgtggcggcgaaactggcccgcgccagcgccgatgcctggaccgcacgcacgccggaaaaaccgcgctacgtcgcaggggtcctcggcccgactaaccgcacggcgtccatttctcccgacgtcaacgacccggccttccgcaatatcacctttgacgggctggtggaagcctatcgtgaatccaccaaagcgctggtggaaggcggggcggatctgattctgattgagacggtgttcgataccctcaacgccaaagcggcgatctttgcggttaaagaggagtttgaagcgctgggggtcgatctgccgattatgatctccggcaccatcaccgacgcctccgggcgcacgctgtccggccagaccaccgaagccttttataactcgctgcgccacgccgatgcgctgacgtttggcctcaactgcgccctggggccggatgagctgcgccagtacgtgcaggagctgtcgcgtatcgccgaatgctacgttaccgcccacccgaacgccggtctgccgaacgcctttggcgaatacgacctcgacgccgacacgatggcggcgcaaattcgcgaatgggctgaagccggattcctgaatattgtcggcggctgctgcggtaccacgccggaacatatcgccgccatgagccgcgcggtggccggcctgccgccgcgccagctgccggaaatccccgtcgcctgtcgtctttccggccttgagccgctgaatatcggcgatgacagcctgtttgtgaacgtcggcgaacgcaccaacgttaccggctcggcgaaattcaagcgcctgattaaagaagaaaaatataacgaagcgctggatgtggcgcgccagcaggtggaaagcggcgcgcagattatcgatatcaatatggatgaggggatgctcgacgccgaagcggcaatgacgcgtttcctcaacctgatcgccggtgagccggatatcgcccgcgtgccgattatgatcgactcctccaaatgggaggtcatcgaaaagggcctgaagtgtattcagggtaaaggcatcgttaactccatctcgatgaaagagggcgttgagccgtttatccagcatgcgaaaaaggtgcgccgctacggggccgccgtcgtggtgatggcctttgatgaagtgggccaggccgatacccgcgagcggaaaattgaaatttgccgccgggcgtacaaaattctcaccgaagaggtgggcttcccgccggaagatatcatctttgacccgaatattttcgccgtggcgaccgggattgaagagcacaacaactatgcccaggactttatcggcgcctgcgaagatatcaaacgcgaactgccgcacgcgctgatctccggcggcgtctctaacgtgtcgttctccttccgcggcaacgacccggtgcgcgaggcgattcacgcggtattcctctactacgccatccgcaacggcatggacatgggcatcgttaacgccggccagctggcgatttacgacgaccttcccgccgagctgcgcgatgcggttgaagatgtgattctgaaccgccgcgatgacggcactgaacgtctgctcgatctggcggaaaagtatcgcggcagcaaaaccgacgataccgctaacgctcagcaggcggaatggcgcagctgggacgtcaaaaaacgcctcgaatactcgctggttaaaggcattaccgaatttatcgagctcgataccgaagaagcccgccagcaggccgcgcgtccgattgaggttatcgaagggccgctgatggacggcatgaacgtggtcggcgacctgttcggtgaagggaaaatgttcctgccgcaggtggtgaaatccgcccgcgtcatgaagcaggcggtggcctacctcgaaccttatattgaggccagcaaagagaaaggttccagcaacggcaagatggtcatcgccaccgtgaagggtgacgttcacgacatcggcaagaatattgtcggcgtggtgctgcagtgtaacaactacgaaatcgtcgaccttggcgtgatggtgcctgcggataaaatcctgaaaaccgcccgcgaggttaacgccgacctgattggcctctccgggctgattacgccgtcgctggatgagatggtcaacgtggcgaaggagatggagcgtcagggctttactattccgctgctgattggcggcgcaaccacctcgaaagcgcacacggcggtgaaaatcgagcagaactacagcgggccgacggtctatgtgcagaacgcctcgcgcaccgttggcgtggtcgctgcgctgctgtccgatagccagcgcgatgattttgtcgcccgtacccgcaaagagtacgaaacggtacgtattcagcacgggcgtaaaaagccgcgcaccccgccggtcacgctggaggccgcgcgcgataacgacctggcctttgactgggcaagctacaccccgccggtggcccatcgtctgggcgtgcatgaggttgaggccagtatcgaaaccctgcgtaactatatcgactggacgccgttctttatgacctggtcgctggccggtaagtatccgcgcattctggaagatgaagtggtcggcgaagaggcgcagcgcctgtttaaagacgccaacgaactgctggataagctcagcgccgggaaggccctgaatccgcgcggcgtggtggggctgttcccggctaaccgcgtcggcgacgatgttgaaatctatcgcgatgaaacccggactcacgtgctgacggtggggcatcatctgcgccagcagaccgagaaagtcggctttgccaactactgcctggcggattttgtcgcgccgaagctgtcagggaaggcggactatatcggcgcctttgcggtgaccggcggccttgaggaagacgcgctggccgacgcctacgaagcgcagcacgatgactacaacaagattatggtgaaggcgattgctgaccgcctggcggaagcctttgccgagtatctgcatgagcgggtgcgtaaggtttactggggctatgcggcgaacgaaaacctcagcaacgaggagctgatccgcgagaactaccagggaattcgcccggcgccgggctatccggcctgcccggagcacaccgaaaaggcgacgatctgggaactgctggaggtggaaaaacgcaccggcatgaagctgacggaatcttttgccatgtggcccggcgcgtcggtttccggctggtacttcagccatccggacagcaaatacttcgcggtagcgcaaattcagcgcgaccaggtggaagactatgcgttgcgtaaggggatgagcatagcggaagtggagcgctggctggcgccgaacctcggttacgatgccgactgatccaccaaaccgttatctttccttacaactaacagggcgctcaacgagcgccctgtctctttattgtgcgtaaacccttatactgaaggaagcttgcgatcgttgccgtcggataagcgaagcgctatccgtcctgtaacggtttatgagtttcgggaacgaataaatataaggagaagctgattccgtgttaactctgctacacctgttgtccgccgtcgccctactggtgtggggcacccatatcgtccgtaccggcgtaatgcgcgtctacggcgctcgtctgcgaagcgtactcagcagcagcgtggagaaaaaaccgctcgccttctgcgcggggatcggcgttaccgcgctggtgcagagcagtaacgccaccaccatgctggtcacctcttttgtcgcccaggatctggtggcgctggcccctgcgctggtgatggtgctgggcgctgacgtcggtaccgcgctgatggcgagggtgctgaccttcgatctgtcctggctttcgccgctgctgatttttatcggcgtgattttcttccttgggcgcaagcaaacgcgcgcgggccagctcgggcgcgtggggattggtctgggcttgattctgctggcgctggagctgatcgttcaggcggtgcatcccattacccaggctaatggcgtgcaggtgatttttgcctcgttgaccggcgatattatgctggatgcgctgatcggcgcggtgtttgccatcatcagctattcaagcctggcagcggtgctgctgaccgcaacgttaaccgccaccggcgtgatttcgtttccggtggcgctgtgcctggtgatcggcgccaacctcggatccgggctgctggccatgctaaacaacagcggcgctaatgccgccgcccgccgcgtggcgctcggcagcctgctgtttaagctggtgggtagcctgattatcctgccgtttgtgcatctgttggcaaacgtcatggatgagcttccgctgcaaaaatccgaactggttatctatttccacgtcttctacaacctgatccgctgtatcgccatggtgccgtttgccggccccatggctaacctctgtaagcgtctgattcgcgatgagcccgagctggacgcgcggctgaagccgaagcatcttgatacttcggcgctggatacgcccgccctggcgctggccaatgctgcccgcgaaaccctgcgtattggcgatgccatggagcagatgctggaaagcctgcataaagtgatgcacggcgagccgcgtgaggagaaagagctgcggcggatggcggacgatatcaacgtactttacaccgccattaagctctatctggcgcggatgccgaaagaggagctggcggatgaggagtcccgccgctgggcggaaattatcgaaatggcgcttaacctcgagcaggcttcggatatcgtcgaaagaatgggcagcgagatcgccgataaatcgctggccgcgcggcgcgcgttctccatggagggattaaaagagctggatgccctctacgagcagctgctcagcaatctgcagctggcgatgtcggtcttcttctccggcgacgtgccgagcgcccgccgcctgcgccgcagcaagcatcgttttcgtatcatgaaccgtcgttactcgcatgcccacgttgaccgcctgcatcagcaaaacgtgcagagtattgagaccagtacgctgcacctggcgctgctgggcgatatgaagcgtctgaattcactgttctgctcggtggcctatagcgtgatggagcagccggatgaggacgatgagcgcgatgagtattaagcgctgatgtgccgccagacatccccggctcgcgctgcgcttagccgggctacaggtataccgctgtctgcgggatggtagtccggctaagcgcagcatcgcctccggggaattatgccgctctgcgctttgctcccgggggcggcgcaagcgccttgcccgggctacgagttctccaccgtctgcgggatggtagcccggacagatgcgcagcatcgcctccggggaattatgccactctgcgctttgctcccgggggcggcgcaagcgccttgcccgggctacgagttctccaccgtctgcgggatggtagcccggacaggcgcgcagcgccgcctccgggaaacgtgcgcacggggtttagaaacgatgaccggcgttgagggtcaccgcgtcttctccggctctgaataccagcgttggattcgggccgccaagggtagcgtggccctgcgtcacctgtatccagttgccttccggcaggccgataatcgtcagctccggcgcaaccaccagcagctcgcggatccgctgttcgcgggtctcgcctttatggccttccggcagcgcgttggtgaaatgcgggttaatttgcagcgggaacagccccagcgcagcaaaaccgttagggtcgacaatcggcatatcgttagtggtgcgaatcgtcgggcaggccaggttagcgcccgcgctccagccgatatacagcgccccgcgcttcaccacatccaccatcggcgccagcaggccgcgttcgcggcactctttcagcaactgaaaggtattgccgccgccgacgataactatctccgcattctcaatcgccgacaccgggtccgcgacgctgtgaataccggtaaccgtaacgcccattgggctgaagacggcggcggttttcgcggtgtaatcatcccaggtttgcgtcaccccggcaaaagggatgaataccgcagaacggcggccatttagctgcccggcaatggtcggcagcgcatgttccagccaggctttgcccggcagcgttgagttactcaatagcagcagttccattatttctccatttgaccagatgattattcgggcagagatattatcacaggatatctcaccgcttgctgacgtggctcacgctgggacgcgctgagcaaagcggaacggtgattattggcgcagcgactctctgaattaatctggaaagcgcctcgcagactgactctaccgggcgtgacaggttagcgggaaccgcttagttttacgttgatgattcacaggcaaaggaatagaaaatgctcgtttattacgctaatctgaggcatgtcatgcgcattaccatgggggctatcatgcgcactacgtcgaacgttaaaaaatcagtcaatgtctcgctttcgcctgaaatcctggaagaggcgcgtaagcttaaaatcaacatttcggcggttttaacggaagctttacttgagaaatttcgtgagcacaaacgtgaagagtggttacgagacaataagaaatcgatcgatacgattaaccaatgggtagaagaaaacggttcgtttagtgattttcaaaggccgttctgatggaacaatattgcgcttatgagaatacgggaagcggtaaaaaggttttcccttatttaatcaacctgcagcatccggtcgcgaatgtcctgaagcatatcctggttgcccctgtgatagaacaaaaccaactacctgatacccagcctccgaccaaaatttgtcccgtgattacgattgccggtcaaacttatattgtgatgacgcatatgatggcgggtttaccgcagaaagaactgggcaagcgggttgctgatttgacggcggacagggctgcgctgcgcgatgcaatcgcctttctgatcaacggttattagagcgccctccctggcgctctccgttttgcccttatcctctggcaaaggccgcggcttcagcgaccagcgccgcgtccggacgcacgccggtgtagagcgcaaactgctccaccgcctgcagggcaatcacctccgcgccgctgataacgcgcttgtccagcctctgcgccagcttgatgagcggggtttccggcggcagagcgaccacgtcaaatatcacgtcggcccgttccaccatcgtcgggctaaaggccagggtttcgctttccgcgccgcccgccatgccgagcggcgtgacgttaaccagaatatccgccgcgattccctccggcctgggctgccactgaaaaccgtactgctttgccagcgccaggccgcgctcgcgatggcgggcggcgataatcacatcgcggaaaccggcatcgcggaaggcggcgatgaccgctttgcccattccgccgctgccctggatcatcactttggctgaggaatcgagctgatagctgtcaatcaggcttttcaccgcgatatagtcggtattcagcccggtcagcctgccgtcgtcgttgacgatggtgttgaccgaatcaatcgcctttgccgaagggtcaagcgcgtcaagatacgctatgcagctctctttaaacggcattgagaccgcgcagccgcgaatgcctaatgcgcgcacgccgtttaccgccgcggctatatcctgggtcgtaaacgctttatagatatagttcagccccagcttttcatacaggtagttatgaaagcgggtgccgaagttacccgggcgaccggccagcgacatgcacagccgcgtatcgcgatcaatcatgagcaatatcctccgcgtgcgccagcagatactcttccgcctcttttgaccagataccgtggtgacgttccataatcgccgccagctgcgggtcgctaatgtttcccagcggcgtaagcggaatgttttttccggtataaaccagcttcttaccgccgcctaacgccggtaaatccagggtggtctcgcccgccgcgttcagccccagaatatgagtcaccaccttcgcggtctgcacctttttctcctgcatcagcgctacggcggcgcgcatatcatcggtattgccgccggaggtgcccacgtagtgggtgaaggcgtaatgcacatcgtaaaaattgatcggtgcgctgaactgcttatcctgtgggccggcgaaaaagttcaggcagccgtccggggccagcagcgaggatgccagggtgatgagctgttcgttagggacgaagacgaagatatcgtcaaagccgtggccgccggagagcgccatcagcgtttcgcggctggcgtcgcgcccatccagatagtgaatcaacgtttgcggctcggagggatagtgctggcgcgcatagctgagctttggcttattggtatcggtgaccaccagcagcgccgggttgatcgggccatgcagcgcgtagtcgatagccagtagccccatcgggccggtgccgccgaggatcagggtgcggccctgcgggcgaatgcccatcacatggttatagctgccttcctgcagatgatagttggcgttgaaggcgccaattacgcaggaaagcggctccaccagcgagccttcaaaccaggtatcgccttcccaggaaagtaaacaatcctgttccatcacctcgttggggatcaccacgtgggtggcttcgccgccgatccatggaaaagaataaccggggcagtccgggcgatccggcagctgcaggttggcctgaatcacatagcgctggccggcgtgaaacttgtgctgccactttttgccgacggcgataatctccccgcagaactcatggccgataatgattgggttcgtcgccacatcgtcaggcacctttttgtggtcctcgccctggttcgcctctttccacgaggagaggcacaggctgtcggtgaccacccgggcgaggatttcatcatcctgcatcgccgggagttcgaaggtttccaggcgcaggtcgcgtttgccgtacaggcgcagggctgttgttgtttgcatgtttaccacctcatccccttcatctttcgcatgacggctgcgaaatcttttgggtctaacttgttgaagtagccccggcatcgccggggcggaaaaatcaggacaggaagcccagcgcgttaccgataatccccaaaccgaagagggcgaaaatcagccataccgggttcactttcttattgagcaggcgcaccatcagcagcgtcaggcccagagccagcaggccggggcagagctgatcgaggatgtcctgtacggtcatggtgacggtcgagccgtcggcgcccggggtttgcgagaccaccagcgggacgttgatggtggtccacttggtcaccagcacgcccatcacaaacaggccaagaatggaggcgccttcggtcagtttttgcagcaggttgccgcccatatcgctgacgatattgacccctttacggaagccgagctgcagcccgtaccacttcatcgccagacgtaccgcgttgaaaataaagaagaacagcagcggtccaagaatattgccggagagcgccagcgaggcgccgagggcggcggtaatcggccgcagcgtgccccataccagcgggtcgcccacgcctgccagcggccccatcaggccaactttgatcccgttgatggcgccatcgtcgatagcggcgccgttggcccgggcttcctccatcgcggcggtgacgccaatcaccggcccgcagactgccggagtggtgttgaagaacaccagatggcgcttcagcgcggcgacctgatcctccttcagcgggtagaggcgcttgatggccgggatcatgtcgtagcagaagccaagcccgtgaatacgttcgaagttgaatgacgcctgctgcaggttggagcgcagaaacatgctcaccaggtcgccttgggtaatttttctctgttccatgttgggctccatcagtcgtcaagctggtcaagggcagtggaagaggtggcggcggcctgcggttcgggtttacgccactgcggattaagctggatataaatcagcgcgatgatgaccccgacgccgccgaaggccagcaggctaaagtcgaggtagccgcccgcgaggaagccgaggaagaagaagggcatcagatacttcacgcccatcatgcgcagcaccatggcgtagccgaccaccacgataaaaccgccggcgatttgcagaccgcgggtgacgaagtccggaatggcgttgagcatattgctgaccatatccgcgctgacaaacagagaaacgatgagtgcgggaatggcgacgcgcagcgcctgaacgcccagcgccgacacgtgcagcagatcgattgttctgaagcgcgcctcttccgcggccttatccgccgcgtgctggaacaccacggtaatggtgcgggcgaacacggtgagcacctgacctgcggcagcgaccggcagcgcaatcgctattccggtagcgatactttgctggcccacgatcaccaggatggcggagataatgctggctaacgccgaatccggagactgcgccgcgccgacgttcatccagccgagcgcgatcagctccagcgtcccgccgagcataatcccggtttttagatcgccgagaattaagccaatcacggtacaggcgattaatgggcggtgcgtctggaattcatccagcacgctgcccatcccggcaatacaggaaaaaataaatatggcgattatttgtagggtacttatttccataatttgtcaccttgagggtatagaaatccctgccttttacggcatttacacgatgttcttcaggctgcctctttgttgactgcattctctcgccccagtcgcatagttagctatgctgctggtgactcgctcatttgccgccgcgatacatccagaatgacagtgtgtaataaaaggcgcgttttattattctgtaacggactgctctgctattttatcgagaatattaaccgacggatctgaagccacgacgcgtaaatcaagcttaacgcccagagtatctaactgctgaaaggcattaatatccgttgcgtctaatgacaccgctttggttaactgttttttacccggtcgccaggccatgccgccaatattcagcgtggctattttgacgccctgctgcaccatggttaatacgtcctgcggattagtgaataaataaaaaaccgtttcgtcctgatattgcgggttgtgataaacggcgacggctttctcaatattcaccacattgaccttcatgcccggcggcgcggcctggcgaagcagcgtgcggcgaacgtcgtcgttatacacgtcgtcattacagataatgatgcgctgggcgttggccacttttgaccaaacggtggtgacttggccgtgaatcaggcggtcatcaatgcgtgcgagcgtaatgttcatcagaaatcctcctcaacggtttccggctgccgccaggtgacgcagcactggctggcgatggtctcaagatgttggcacagtgcttctgcattcatcgtttgctggttatcgaccagctccagagccagcggtagcgacaggccgctgatgacccgaagctgcgggttgcgcatcgccaggccggcggcggcgttccacgggctgccgcactgtagatcgacggcgatgagccactcctcctctttgtgagtacttaccaacttttcaagcttatcggcgatatcgcccgcgttttcccccggtacaaacgccacggcgctgacgtggacatcgccgtaaaccatgcgcaccgagtcgagcatggcgcaggccagctgaccgtgagcgcagaagatgacgttaaccatgtttcccccttagccgcgcgttttgccgcccgcaatgttagtggttactccggtaatgtagctggcgcgctctgagagcagatagcaaacaaaatcagcaacttcgctgagacggccggagcgaccaacaggaatcgcatttttgctatagccttcgcgcagctgttcgacggtgatattgcgggtccaggccagcgcttcttcatattccggcgtacgcagcccggttttttccagaatgcccggcgcgacgcctacgacgcgaataccgtgcttgcccagctctttcgaccaggagcgggtaaagctgttcagcgcggctttggtcgcggcgtagcagctctggccttcagagccttcgagaccgctttccgacgagacgttaacaatcacgccgctgcgctgtttaaccatctggcgcgccaccgcctgcgacatcaggaacacgcctttctggttgatattgaccattttttcgaatgccgcttcatttaattcatagcgaccggacggcgctttctcatccactaataaacgcgggaagttgacgccggcgttattgactaaaccatcaatgcggccaaagcgctgaataatactctcgacggttttattcacttcgctggcgctggaaatatcggttggccagaaattataattatcgcgattctgatgtttgtcgccgccgtgaatatcgctcatctgcacgtttgcgccctgggataataactcatcgacaatcgccaggccgattcctgatgcgccgccggtcacgataattattttgtcttttaaatttaaccatgtattcattatcgactcctgtttctttagataaagggatcccccgcagcagcgctgcgtgaaatcatattcttgacatttacttcagtaatgactcagcggtttctcgattcgtcaccagacaattaatgtaatgaccgtttaaggcgccaagaatcccggcgtatttctcctcgcccatggcgatacccaccgagtagcgcgcctgcttgagtttcgccatctcgatagagagcgttttttcgctcatggcggtttcgaccagcgcgccatcaatgttgtaaaaacgcgaacagatatcgccggcgacctggcgagcgttgagatcgtcgctctcttcactgccgtaaaatgcatgccagttggcgccgtcgcggatcgccggagaaccaatgcccaccagcgcgacgtccaggttatcccagtaggaggcaatcgttttaaaatgccgggactgcataataccgttgcgaattaatgtgttatccagcagtgccgggaaatcagcgagatgagattccgctttcagcttcgccgctgcgccgtaggtcagcgtattcacgtggtaacgactttccagttttccggaggggccgccgataatcggcacgcagataacctgacgggactggctggcctgcggcagattctccaccagcgcgcgcaccgcccgaccccaggagaagccgacgatatcgcccggctccagcagcctgtcgaccaattgcgcgccatgcaggccgataagattgagctgatcctcctccagcagtgagtcgcaggccgccaccaccgcctctttgagaccgaatttttgttttagctgctgctcaagccacagattttcgttgtagtcgtagttgatggcgatagtgacgatgccctgctcgcggccgcgcttcagcagacggctgatagtggtgcggtatatccccagctcgcgggcaatctgcgcctgggtcatatcctgctcatagtagagctgggcgattttcacgatcagacgaatatcgtcgctgttttccatcgtcactgtcggctcctgcacatttgtgcaaatgggagagttgctgtcatgatctgatataaccccatcagcgacccgcttcaaagaaattttcctctatttcatgaggatgttccgaccgtttctgttgcacatttgcgttgcttaccggtggtttatggcacctttgtgccggacgtgataagagcctgattctgctttgtttcgccgggcaaagttgccgggctttcatgggcacacttttgtgttgaaaggcggagcagatcacatttagcggcaggcgacgagagcgcgattcttttttatcgcccgcaaggtagggtatatttcgcttttacaggagattttatgctgcccgactcatcaacccgactcaataaatacatcagcgaaagcggaatttgctcgcgtcgtgaagccgatcgctttatcgaacaaggcaacgtttttatcaacggcaagcgcgctaccatcggcgaccaggttaaagcgggcgacgtggtaaaggtcaatggccggttgattgagccgcgcgaagcggacgatctggtcctgattgcgctgaataaaccggttggcatcgtcagcaccaccgaagacggcgagcgcgacaatattgtggatttcgttaaccacagtaaacgcgttttccccatcggtcgcctggataaagactcccaggggctgatctttctgaccaaccatggcgatctggtgaataaaatcctgcgcgccggtaacgatcacgaaaaagagtatctggtcaccgttgataagccggtgaccgatgagtttatccgcggcatgggggcgggcgtaccgattctcggcacggtgacgaagaagtgcaaagtgaaaaaagaagcgccgtttgtgttccgcattaccctggtgcaggggctgaatcgccagatccgccggatgtgcgaacactttggctatgaagtgacgaagcttgagcggacgcggatcatgaacgtcagcctgacggggatcccgctgggagagtggcgcgatctgaccgacgatgagctgatcgatcttttcaaactgattgaaaactcgtcttcagaagcgaaaccgaaggcaaaagcgaagccgaaaacggccggcatcaagcgtcccgtcgtggcgattgaaaaaaccagcgacaagtcttcccgcccggcgtcgaacggcaaacgctttaccgcgccggggcgcaagaagaaagggcgttaacgtctgccgcgcgtcggggtatttgccgaccaggaaaacgaggcctctgcgtctggtttataagcctgctttttcttcagctggcgggctttcttagcctcggcctcgcgcagggccatcagtttatcgatgtactcttttttcacgctattggtttccgcgttggtcagcggacggccatgggcgatgcgtgcgcggtctagcagggttttcagttcgcgctgttcgcgctcggtcatctctttttgcgtgatgcgggggagtgccatagtggtgccctcaattagcctgtggtttcagtgtacggtattggggctgacgtctcacggtaaattgttgtgcctcgcagaaaatcccggaggcggcgctgcgcacctgtccgggctacaaaacccgcaagctgcacggaccgtagcccggctaagcgcagcgcaagccgggaaaattacgggttattcgcgctcttttaccgtttacgcggtttgtcggcgataggcttccctgaccagtagccggccagcagcgagccggacaggttgtgccagaccgagaacagcgcgccgggcagcgcggccagcgggccaaagtagattttccccagcgcggcggcaagtccggagttctgcattcccacctcgatcgccagcgtgcggcaggtggattcgtcaaagccaaacagccgcccgccccagtagccgccgagcagaccgatagtgttatgcaggataacggcgataatcaccacaaaaccaacggaagcgatatgcgacgcggagcctgccaccacggcgcagataatcgccagaatgcagaccatcgaaaaggccggcaggaacggctccaccgccttcaccactttcggttgcagatggtgcacgaccagccccagcgcaatcgggatcaccacgatttgcagaatgctgagcagcatccccatcacgtccacctgaatatgcgcatccacgtacagacgcgtcagcagcggggtggcgaccacgccaaccagcgtggaaaccgatgagatggtgactgagagcgcgacgtcgccttttgccagaaagatcatcacgttggatgccgtaccgctggcgacgctgccgaccagcaccatcccggcggagagctcgggcggcatgtgaaaaatcagcgccagcagccaggcggcgagcggcatcaccaggtagtggagaaaaatgcctgcggcgaccggcgcggggcgggaaagcacgcgcttaaaatcgtcgactttcagatgcacgcccatgccgaacataatcagcatcagcagcgtcgggacccacgggccaacgggggtaaaagtggatggcgtgtaataggcgataaccgagagcagcagcgcccataatgggaacagccgcgtaagcgtggcgagcatgttgttttccttgcacgtaagttgtgtttgcttgttattgtccggccgggatcgagcccggccatcgctattgtttatcgtgctaagaaatattattcaaacaaattatgttcatgttccgctgcggataagctcccagctgagtccgaagcgcgctaaatatttgcgcaggcggtcagcatcgttaggattggcctttttctgccgggagacggcgaacagctcgcgtccggcttcggagagcgaagcgctgcgctggcagacctccagcaccgtttccagctggcggcgatcgaacagatcgatttccattgcaatatcaggagaagatgtcgtgagctgccagctctctttcagcagcattatctcctcttccgcaacggccagcgtaatgcgcccctgctcggccagggtcgccatacgcgccacggaggagcctagctcgcggaaattgccgcgccattgcgcctgcggcgagcaggcaaaggccagatagcgttcgcgggcgtctttatcgaagcggatctgcgtctgccgctcgttggccagtcgccgtaattcatactccacgttcggcgcaatatcttcccgccgctgcgccaggccggggagggcaaagcgccacatattgatgcgcgcataaagatcttcgcgaaagcgcccctccgccacccactgctgcatatcgcgatgcgtgccggcgattagctggaagtcgctgtgcacctctttatccgagccaaacgggaaaaaggttttttcttcgatggccttcagcagcatagcctgctcatccagccccagctcggcgatttcatcgagaaacagcacgccgccgtcggcttcgcgtaatagcccggcgcgaggcgtaaccgcgccggtaaacgcgcctttgacatgtccaaacagcgtggacatggcgttatcaccgcgcagcgtggcgcagtttaccgccatgaattttcccgccacccgatggcgcgactgacgaagctgaaaaatacgtttggcgaggacggacttcccggcgcccgttgggccggtcagcaggatcggatcggtcgatcggatcgccacgcgctcaatacgatcgataagcgcgttgaacgtcgcattacgcgtctcgatacccgccttcaggaaggagacggactgctgctgctcgcgctgaaagcggctggtgagcgtggcgtagcggcttaagtccagatcgatcaccgagtaaataccggcggcgacggcgtcatccgctgcgcctttcggcgcagggctggtctgcagcaggctggcggggagatagcgcgcttcggtcagcaggaaccagcagatctgcgccacgtgggtcccggtggtgatatgcaccagatactcttcgttttcggtatcaaagcgatagcggttggcgaagtcgagaaacgccgcgtagacctcttcaaaatcccacggatcgtttatctcaatcgtatgcgggcgcacttcggtatgcggcgaaagctgggcgacatcgtcaatcagcttttgcgccatattttcatcacgcggctggtggagaagctccagcctgtcgacaggaaaatcggcctgctggcatagcccaacggtaggccgccattttttaaagcgattcgcccgcttgccgcgtttgtccagcaccgttccgaggacgccaatgaccactcgccgctttttcatgtttatcccaaaagataagtttcgatatttaaagataaaaaaacctgctgccggcggcaagcgttaccgtttgaattaaaaacaaaagcgttattaatcaattgattgaaaaataactctcgcattttttattgttggcacgcaactggcaatatcccttccgtcacgacgctgaaaacgcagggggttaaacctcgccggcacgccaggaacggtacaggccgtttttcgggcgcgttccgtcagccgatgaccaccaatgggttcgattcccgatttcatctccaatgaaaactggtcgttaatcatagaaataacgcggggtgatgcgcagtcagcatgccccacagcaggccgccggtaaaggcgccgtgccgcaggcaaaagggagttcccctgcggcttcgcccctgcacccgcgcctgattttgctaaggaacaaaaaatgacgaagaaaatcacgatacgtaaaggtcagcttggccttttatcccgtcagggtgactactatcaggttctggaagcgggcgagcatcgcctgccgtggttcaacgtccccgaagtgctgatcgttaaccgggacggcagcgaagtgccggaggcgctggcggagtatttacgacgctttcagccggaatggattgaacgctactgcctggcggcggatttgacggatgtcgaggccggggcgctgtatgccaacggtgtgctgcaggaaattttaccgccttcgacgcgccgactgtactggtccgccggtgatgaaattcagctgctacgtatcgatacccggcaggttgcggttccggctgacattatgaatgcggtgctgcagccgcgacgtcacggggcggtaaaaggtcgcgaagcgatcctcaccgtatcggtgccggcgtggcacgtcggggtgctgaaaatcgacggcgagacacaatcgctgctgcagcctggcctgagcgcgtactggaaggtcaatcatctggtggaagcggaagtggtcgatacccgcctgcaggtgctggaggttggcggccaggagattctgaccaaagataaagtgaacctgcgtttaaatctggcggcgaactggcgctacagcgatgtactgcaggcgtttggacagctgacgaagccgctggaccatctgtatcgcgagctgcagtttgcgctgcgtgaagccgtcggaacgcgaacgctggatgagctgctggaagataagaaaatcattgatgaggtcgtgagcgcgcaggtcaccgagcgcatggcggcatttggtatcgacgtcgcgtcgctgggcgtgaaggatattgtgctgcccggcgacatgaaagccattttgtcgcagctggtggaggcggagaaatcggcgcaggcgaacgtgatccgccggcgtgaagagaccgcggcgacgcgctcgctgctcaacaccgcgaaggtgatggagaataacccggtcgcgctgcgcttaaaagagctggaaacgctggaaagagtggcggagcgtatcgataaaatctcggtctttggcggcctggaccaggtgctgcatggcctggtgaatctaaaaggataatgaaaatgacgtatcacgctgtaagcgccgccatgcgccataaggtgcagcggcagttaaaagacgtggagcagcgctacggcgtcagagtgctctacgcctgcgaatccggcagccggggctggggctttgcctcgccggacagcgattatgatgtgcggtttctctacgttcacccgctggagtggtacctgcgggtggatcccccgcgcgatgttattgagctgcccatcgacgatgagctggacgtctgcggctgggagtggcgcaaggcgctgggtctgctgaaaggggcgaacccgacgctgatcgaatggctggattcaccggtggtgtatcagcaggatgacgcaacggttcaggcgctgaagaaagtgataccgcattggttttctccggttcgcgcccgctggcattactattcgatggcccgtaaaaattttcgcggctatctgcaaggcgaacgggtgcggctgaaaaagtacttttacgtactgcgcccgctgctggccgtccgctgggttgaggcgggaaaaggcgtgccgccgatgcgctttaatgaactgctggcaggaagcgagctggaagcgggtctacgtgcggaaatagacgaactgctggaacgtaaacagcgcgcaggagaggcggaaaacggcccgcgtcgaccgctgctgcatgcgtttattcagtccgagctgctcagaggcgcaatcccgccagcgctgcctgagagccggagcggtgatgtcagggagttggacagattgctgatgaccacggtgatgggaaactaaaaatggcccggtagaaatggcgggccattttattcgctattactcgaacagattatgatgcagcttctgcaccactttttcggcatccgcacccgggaccaggaagcacaggttatggctggatgcgccgtagcaaatcatacgaatattaaacgggtccagtacgccaaacacctctttaccgacgccgcacgccttcgacagttcattaccaatgatggcgaccagcgccagatcctgctcgacctcaacgcggcacagagaggaaagttcggtcaacagtccctgggtgagcagggtatcgccagccgacgtcgaaccggtggtatccatggtcagcgccacgctcacttccgacgtggtgatcagatcgacggagatactgtggcgggccagaatactgaatacctcggccagaaaaccgcgtgagtgcagcatattcaggctgtgcagggttagcagcgtctgcttgcggcgcagcgccagcgcgcggaacagcggcgggttttcggtgtttttgcacaccagcgtgccgccggctttcggctctttgctggagccgacgaataccggaatatcgctgcgcacggcggggagcagggtagccggatgcaggaccttcgcgccaaaggtcgccatttccgccgcttcttcaaaagcgataacgtcaatgcgtttggccgccggggcgacgcgcgggtcggtggtatagatacccggaacatcggtccagatgtcgacgcgggtggcgtttagcgcttcgccgagtagcgcggcggtatagtcgctgccgccgcggccaagcgtggtggtgcggcctttggcttcgctgccaataaagccctgggtgatcaccacgccttccgcaagacgcggggccagcagctgctgggttaattcggataaggcggcaatatccggttccgcgcggccaaagcggtcgttggtgcgcataattttgcgcacgtcgaaccactgggcggcgataccgcgctcgcgcaggatctcgacaaacagcagagtagacatcagttcgccgtggctgaccagttcgtcggttaacgcggttgaactggccagggaggcggcttccgccagggtggtgatgttttccagcaggcgctcaatttcatcgcgaataacgttgggatagcgcaaacgctccagaatattgaactggatttgacgcatggcatcgagcttcgcgaaacgttcgccgggttccagcccttccgctaaggcgaccagcaggttggtcacccccgctgaggcggaaagcaccaccacgcgggtattggcgtccagcagcgcgacgtccacgctgcggttcatggcatcaaaatcggcaacgctggtgccgccgaacttggctacaactaagtctgtcataacaacctcgtgtcagggggcctgacttattaaaacgattccagaaaaccaatcctggcggggctggacgcaaccggattgcaataaaatgtcttaataagccaggccaaattattcagccatggcacaagggaagagcgaaaaacagggtgggcgcagagcgataaacaaactacgatgtcacccagaagtgctccaccttgtagacccgcttgccgatgctgtgcatcagacggcgagtatgaaacgcccgactgcgaacgtttctggtgacaacccaggggattcagcccctgtggccggtgatgagcgtaaccagacgcttattcacctcggcgttgctccccctcacgtattttccccggactggctcctccaatacggttacctgggcaacgcacctcttctggcaattaccgacgtctttcactttgccagggggacgcgggacattatacccccctgcaataccctttcgctgtagcgtgaaatgcgcgatccatacctacctacgtatatgtaggtactgccgttatataaaggcttcaggcgaagtatgtcaacgtcagggttatgcggatttttcatgcgcgagtcgctgacagaaaaaagccttatgatgtctatactatgaggggcgatttgcgccaaattggctctaatcctgacgcgtatcatcggcataacacaaaaatcatcacaatttttcgtcaccggcgctacaatcgaccgcagtcacaattctcaaatcagaagagtattgctaatgaaaaacatcaacccaacgcagacctctgcctggcaggcattacagaaacactttgatgaaatgaaagacgttaccatcgcggatctgttcgcgaaagatagcgatcgtttctctaaattctccgccacgttcgacgatctgatgctggtggatttttccaaaaaccgcatcaccgaagagacgctggcaaaactgcaggacctggccaaagagaccttcctggcagacgccattaaatccatgttctccggcgagaagattaaccgcacggaagaccgcgcggtgctgcacgttgcgctgcgtaaccgcagcaatactccgattctggttgatggcaaagacgtgatgcctgaagtgaacgccgtgcttgagaagatgaaaaccttctccgaagccattatctccggcagctggaaaggctacaccggtaaagcgattaccgacgtcgtcaacatcggtatcggcggctccgacctcggcccgttcatggtgaccgaagcgctgcgcccgtataaaaatcacctgaatatgcattttgtttctaacgtcgatggtacccacatcgccgaagtactgaaaacggtgaacccggaaaccaccctgttcctggtcgcgtcgaaaacctttactactcaggaaaccatgaccaacgcccacagcgcgcgcgactggttcctggcgaccgccggcgatgagaagcacgtcgcgaaacacttcgccgcgctctcgaccaacggtaaagcggttggcgagttcggtattgataccgccaatatgtttgagttctgggactgggttggcggccgttactctctgtggtcagccatcggcctgtccatcatcctgtccgtgggcttcgacaactttgttgagctgctctccggcgcgcacgcgatggataaacacttctccaccaccccggctgagaaaaacctgccggtgctgctggcgctgatcggtatctggtacaacaacttcttcggcgctgaaaccgaagcgattctgccgtacgaccagtatatgcaccgttttgccgcttacttccagcagggcaacatggaatccaacggtaaatacgttgaccgtaacggcaacgccgtggattaccagactggcccaatcatctggggcgagccgggtaccaacggtcagcacgcgttctaccagctgattcaccaggggaccaaaatggtgccttgcgactttatcgcgccggcgattacgcataacccgctgtccgatcaccatccgaagctgctgtctaacttctttgcgcagaccgaagcgctggcgtttggtaaatcccgcgaagtggttgagcaggaatatcgcgatcagggtaaagatccggcgaccctggaacacgtggtgccgttcaaagtgtttgaaggcaaccgccccaccaactccatcctgctgcgtgaaattacgccgttcagcctgggcgcgctgattgccctgtatgagcacaaaatcttcacccagggcgtgattatgaacatcttcaccttcgaccagtggggcgttgagctgggcaaacagctggctaaccgcatcctgccggaactgaaagatggttccgaagtgagcagccacgacagctccactaacggtctgattaaccgctataaatcctggcgcgcataatcgctaaaacgttcgcaatgccggcccatgtggccggcatttttgttatagccgccgcagcagctttgccgggttcccggcccacacgcctttctccgtaatggatttggtcaccacgctgcccgcgccaatcacgaccccatcgcagatgctgaccgccagaatggttgcgccgctgccgatagacacatcgttgccaatcacaattcttccccagctctcgcggtcggcgttgggttttccctcgcggaacatatcgttggcgaacatcacgccgtggccgataaaacagcgctcgccgatggtcacgtactcgcagataaaggtgtgggactgaattttgctgtcgttgccgatacgggtatggccctgaatctccacaaacggcccgatgaagacgttatcgccaagcgtgcagtcgtagaggttggcgggctggtaaatcaccacgttttcgccgctggcgacgttgcgaatggcggtttcacgaagggtatgcatgctgcctctcagattggtttagccagaatatggagtgtgctttcctgggttgcagaatgaaatgccacatccttcacgtgctgcatcccctgacgttcataaaaacggcgggcaccggtattcgcggcgagcacttccagccatagccagctttcaccggtctctttcgctcgcttctcgacggcgcgaaaaatctgctcgccgtagcgatgcccggtagcgtcaggtaatagatagagtttatgcaatagcgtacccgtagggccttcggggttgatgtcctggcggcaggcatatttagcaaagccaattggctcctctgcctcagcaatcaaccagcagcactgcggatcggccaggctgtgcgccagcgcggccatggaatactcttgctgcaggtagtgctccatttcatcggcgttgtgccagaggtgggcaaagtggtggcgatagctggcattggccatctggttgagtaaagccgcatcttccggacgtgcaagacgaatctttagcattctgcgttcctcgcaaagaagtggcgatattttgcccgtaaagttcgctgcgggtaaacctcaaaagtgggggggataagaagtggccggaggatggcctccggccggggatcaggcgacggcgatggcttcgatctcaatgcccgcatctttaggcagtctggcgacttcgacgcaggaacgggccggaaaggccgcgttgtgttcggtgaagaacgcttcatacaccgcgttgatggtggcgaagtcattcagatccttgacgaagaccatcgtcttaacgatgtttttcacctgcaaacccgccgcttcaacgatagccttaacgttgtccagcgactgtcgcgtctgctgagcgatgtcgtcagacatggtgccgtcctgcggattgaccgggagctgccctgaggtcatcgtcatggtacccagatttactccctgaacatacgggccaatggcggcaggcgcagcggcggtggtaattatcattctgttgattccttctgataggtgattacatgaaatagttgagcaaaaccagtgaaccgacgccgctgacgacgacccagaccaggcccaggcggaagctggcgagcgtgcagataatcgcggcgatcaccttcgggtttttcaaatcgaactccatgctggagttcacgctcaggatctgaatcgtgatgatggccggcagcacggtcaccggcacaaaacgcagcgttttgctgacccggctcgacatctgaatcttcccggcgaggccaatgaacgagaagcgaataagaaaggtcacggcggccatgcccagcgtcagggcgataaaaaagctattactcattttccagcgctccttcgagagagagtttgtcagcggcctgcgcctgtttacgctcttcggcgagatcgacgctcaggcccgccattacgcccagtacggacgcgacgacgatacctaacgagtagggcagtacgaccaaaagtaccccggatacggcagcaacaacggcggcgacggtgcaggcctggcttttgatttgtgggactacgatggcgataaatgcggcgaccatcgcgaagtccagaccatatttttcaatgtgcggaaaagaggcgccaaccagagcgccaaggaaatcggccagcacccaggcgaaccaaaacgtcagcattgctgaaaaatagaaaagatatttatcttttttattctcctccatctctttcaccgtcgtggcgtacacttcatcggtcagggcatacgccataaagcattttttaaagaaggaggcttcgcgtaccgtactggaaatagaggcgctataaagcacatggcgaagattaataatcagcgtggtgaatataatcaccccaaggctcgctccggtttttagcatatttaacgccagcatttgtgccgaaccggcgatgacaatcgtcgaccatgccgtactttgccagatactcatcccggcgctaacgcttagcgcgccgacaataaatgaaaacggaaagtcgccgatgcacaggggaagtatggcgctcataccccgtagaatcacttttttgttcataaacaatacctgttgtattcaggagattaattatttgtgtaaggtacattaaaacgctaattaatgattactttgctaccataatgttgatgatttctttatcggtataggccataggcttaattaccagacggcagagattattaatagtctgctcaacgtcagcgcaaacaatgccgtcattagagcctgcgcagctattttgcatcgccatcagtacggccttaaaggcgctggaaaccacggacgatactttcattgcgcagctattagaggcgccatcgcaaatcatgccggtaatatcgctgatcatattaataatagcggtattaattgtttgcaggtcacgggtaaataaccacgccatgcctgccgcggcgcccatcgctgccgtggacgccgcgcatagcgcggacagacgcgtatagcgggagtggatcgatatggcggtcaggtgggagagcgccagcgcccgcgcgagggtctcttcatcagcgttaagatgctccgcgaccgtcactaccggcatggtggcggcgataccctggttaccggaaccaaagttagacatcgcgacgacgggggctccgcccattcgcgcgtcggatgcggcgacggtattgatgatgactttactcagcaggtcgttgctgagcaggccattttttaccgcatcagagaaggtgccgttgatgttcaagccgtattttttgcttttaccttcctccgccagcgccgaattgagccgggcggcttcgagaataaatgcgatgtcggcgaattcgacctcgttaataaaattaaaggcttccgcaagcgagaaggttgctaatgtttcctgctgcgttaccgtactctgtttgtccgccagtacctgcgcttcgccattaatatacagctcaacgatattggtatgcgtgcccttgaccaccacgcggcagctcttttcgccacccgttagcgtcagatccagatgaataaagtcaggggtatctttcacgctaatattgacctggccatcggcaattaacttctgggctaattcaacatgccgttcggtaattccctccagcgtttttaaacctttatccgcatcgccaccaaatgcgccaattgcggctgcgagcgccaccccgctgacggaagtgcccggaatagttacgcccatcgcattcttgtacaggttcgcagaaataaaaccgctaatgttttgacaagccgtatctaaatgtttcgcagcgtaagcggcggtaaaagaaatagcaacgggttccgtacagcctaatgccggagccacttctttttttagccagtttataaacagggatgagtgttcagtagtcatattttatatcgttccgctaacgagggtttattaatctgcgagtatgctaagtcaatttctaaggaaaaacttactctaatgcgggcgtaatttatgcctgaaagagaaaaatattcgcttattacaatattgtaaaattgtgatcttattatggttaattaactgatttgacgggtatttatattctgttttttgaacataaaaagggatttagttaactacctcacagcgttgccgaaagtaaaaatttctctttttacgtatttcatcggagatgagaaaggcaagcagtggaaagaagggactcacaaatgtagatctggatcacatttttgcgttatacaggtcacaggaaatcatgatgatgaggtgtacctatgccgccggtttatcgtccgttggtgagttttattgcaaccgcaatgcaaaccgttttgaatcttggcctgctgtgcctgggggtcattctgatcgtatttctgggaaaggagacgctgcatctggcgcacgtcctgttcaccccggagcctgtcagcaagtacaagctggtggaagggctggtggtctacttcctctatttcgagtttatcgcgctgatagtgaagtactttgagtcgggatttcacttcccgctgcgctactttgtctatatcggcatcaccgcaatcgtccgcctgatcattatcgatcatgagtcgcctatggcggtgctgatttactccgcggcgatcctgattctggtgataacgctctggctgtgtaactccaaccgactgaagcgcgaataaaaaaagcggcctccagggccgctgaccaacagtcacaaatagaatttatgtagggtccagttgaggatagcagtggcatttgccttactttttcagctgagggcgacggcggtaatacccggttggggtcgcgcattaccgctaaaccgtcggccctcatctgaaatttggggcgggtgttacaaaaaaattaacctttcactccgccagccgtcaggccgttaaccaaccagcgctgggccagcaggaacaccacggtaatcggaatggcggaaagcaccgccgcggcggcaaagtcgccccacagatagttctgcgggttaagatactgctgcattccgactgcgagggtatagctgttcacatcgcgcagcagcagcgaggctaccggtacttcggtgatcgccgcgatgaacgacagaataaacaccaccgccagaatcggtaccgacagcgggagcagcacgaggcggaaagcctgccatggggtcgcaccgtccagcgccgccgcttcttccagcgagccgtcgatggtttcgaagtaacctttgattgtccagacgtgcagcgcgataccgcccatataggcgaagatgacgccgccgtgggtattcaggccgacgaacggcacgtactggccgagacggtcaaacagggcgtacagcgcgaccagcgacagcaccgcggggaacatctggaaaatcagcatccctttcagcagcgttgctttacccgggaagcgcatgcgggcaaaagcgtaagcgcaggtggtagaaagcgcgacgatgccaatggcggtaatgcctgccaccttgatggagttccacagccacagcagcaccgggaaggggggcggcgtgacgcgaccatcagcgtgttcgacgctgaagccgagcgccagccgccagtgctcccaggagatactttcggggatcaggctaccggtggcgaagttcccttcgcgcagagagatagcgatgaccatcagcagcgggaacataatcgccgcgataaaaatcagcagcaggaggtgcgtcgtgaacaggcgcagcttctgagatttgggttgaaccatagccataatcgttatctcccttaatcaaacttcatacgtgtggctttcaggttaacaatcgccagggcgcctaccagcaggaagatcagcgtggcgatagccgccgcaaggccgaagtcctgaccgccgccgccttcaaaggcgatacggtaggtatagctcaccagcaggtcggtgtagcccgccggcgtggtggtaccgagccggtccggcccgccgttggtcaacagctgaatcagcacgaagttgttaaagttaaaggcgaagctggcgatcatcagcggcgtcagcggcttgatcagcagcggcagcgtaattttgaagaagttctggaacggcgtagcgccatccattgccgaggcttcatataaatcgtcaggaatcgctttcagcaggcccatgcacaggatcatcatgtacggatagcccagccaggtgttgacgatgataatcatggtacgcgcggtggtcgggtcgctaaaccaggccggcttgatgccgaacagcgcgctgagcatcatgttgatctcaccaaagctctggttgaacaaccctttgaaaatcagaatcgagataaacgacggtacggcgtaaggcagaatcagcagtacgcggtaaatcgctttacctttcagggcttcccactggacgagacaggcgagcaccatgccgaccgcaacggtgagaatcacggtcagaacggagaacaccaccgtccagacgaaaatcgcgaagaacggtttctgaatgccttcatcctggaacacgcgagtgaagttatcccagccgatggtcacggtgtagcccgggctgagcttttcgctgccccagctaccgtcggcgttgatcgcctgatagaaaccgacctcggcgttcggacggtatttcacgccgctctggttgttggtcagcgtgccgtcactggccagcgcgtacagcggctgagtaccggagaactgacgcagggagctcataatgactttgctttcatccggcaacacggcggtcagctggttcagggcggtacggttttgcgtaatcacgcgcagcgtggcgcgctcgccttccggcagggcgtcagcctcttttaaggccagcttctgttcgccgccgaatttaaaggcgtcggaaagatagtttttgccgctttcgccgtcggtcagcgccagcttccactcatctcccgccggataaagcgcgaagttgtaggatttccctgcctggaaggagcggtccatcagcacctgttgggcgcgttcgaaggtcagctggttagtgctgctgtagttggtaaaagcgatagcgatagtgcagatcagcgggaacaggacgaacagccccatcccggcgagacccggataaacatagcgccaggcgtaggccttgcgattggaaaaaatatacaggccaaccgagctcaaaatcagcgtcatgatggcaaacaggtactccccctgggcgtacatcaaaacaacaaggtaacccaccagcaggcacagcaagccgatcacagaccatgtgagctgcgggctttgccaccagtgcttctttttcacgacatccatggggatcatcctctttacactttatccttcgcgctacctctttgttggctgcagatgcgtaccccagtcacttactgatgtaagcgcctggggatttgcatccttgccgcctcgatgtagcgcgaatgatttcgcgtaacaacgtattcaacaaaccttattccctaagaaataagggaaaccgtattacttggtgatacgagcctgtgcgtctttcagcgccgcatcgacggtctggcgaccgctagctgcgttgatcactgcggtacgaacggcataccagaaggcggacatctgcggaatattcggcatgatttcacctttctgggcgttagccatggtggcggcgatacgcggatctttttccagtttttcctggaaggatttcagcgcgaccgcgcccagcggtttgtccttgttcacttcatccagaccctgatcggtcatcaggtagttttcgaggaactctttcgccagttctttgttcgggctggcggcgttaataccggcgctcagtacgccaacgaacggtttagacgggttgcctttgaaggtcggcagcagggtaacgccgtagttaaccttgctcttatcgatgttagaccacgcccacggaccgttgatggtcatcgcggtttcgcctttgttgaatgccgcttccgcgatggagtagtcggtgtcggcgttcatatgtttgttcttgataaggtcgaccaggaaggtcaggcccgctttcgcgccagcgctatccacgcctacgtctttcacgtcgtacttgccgttttcaaacttgaacgcataaccgccgtcggcggcgatcagcggccaggtgaagtacggttcttgcaggttgaacatcagcgcgctcttacctttcgctttcagttctttatccagcgccgggatctcttcccaggttttcggcgggtttggcaccaggtctttgttatagatcagcgacagcgcttcaacggcaaccgggtaggcaatcagcttgccgttatagcgaaccgcatcccaggtgaacggatagagtttgtcctggaacgctttatccggggtgatttccgccagcaggccggactgcgcgtagccgccaaaacggtcgtgagcccagaagatgatgtcagggccgtcgccggtcgcggcaacctgcgggaatttctcttccagcttatccggatgctctacggagactttaatgccggtgtctttttcaaactttttacccacttcagcgaggccgttgtagcctttgtcgccgttaatccagataaccagcttaccttcttcgatttttgcgagggcagaggcggaaaacatcatcgtggtcaatgcagacagcgcgaggatgcgagcgccagttttgattttcatatacccgtcctatttggtgatgtgctcgtggatacacttgagtggcttaacggtgatgagtttccttttttaacaacctctttccatcctccccatgtctacgccccatcccccgatagtgtgatctccattacagaaatgccggttatgagtcctggagcacataaaaaggcggccaattttgcaggctacatcacgaaatcgacgtccgtccgtcccccccggcggcgagacgcaatctctcatcctcccgcctcctcccccataaaaaagccggggggtggaggatttaccctatttatgaatgccgcatagtcagcccatcttgaatgtgtcgttaagtgacaggttgtaacgaagggagaagggcatggcgagcgtacagctgcgaaatgtaacgaaagcctggggtgacgtagtggtatcgaaagatatcaatctcgagatccaggatggggagttcgtcgtgtttgttgggccatcaggctgcggcaaatccaccctgctgcgtatgattgccgggctggaaacggtgaccagcggcgatctgctgattggcgatacccgaatgaatgatgtcccgcccgccgagcgcggtatcgggatggtgtttcagtcttatgcgctttacccccacctttccgtcgcggaaaacatgtcttttggcctgaagctggccggcgccaaaaaagagctgattaaccagcgcgtgactcaggtggcggaagttcttcagctggcccatctgctggagcgcaaaccgaaagcgctttccggcggtcagcgtcagcgcgtggcgattggccgtactctggtggctgaaccgcgcgtgttcctgctggatgaaccgctctctaacctcgatgccgcgctgcgcgtgcagatgcgcattgagatttcccgtctgcataagcgtcttggccgcacgatgatttacgtgacccacgaccaggtcgaagcgatgaccctggccgacaagattgtggtgctggacgccggtcgcgtcgcgcaggtcgggaagcctctcgaactctatcactacccggcggatcgtttcgtcgcgggctttattggctcgccgaagatgaatttcctgccggtgaaagtcaccgctaccgccattgagcaggtgcaggtggagctgccaaaccgtcagcaggtctggctgccggtggacagcgcccgcgttcaggtcggcgccaacatgtccttagggattcgcccggaacatttgctgcccagcgatatcgccgacgtcaccctcgaaggtgaagttcaggtggtcgaacagctcggccacgaaacgcaaattcatattcagatcccatccatccgtcagaacctggtttaccgccagaacgacgtggtgctggtagaagagggagccacattcgccatcggtttgccgccggagcgctgccatttattccgtgaggatggcaccgcttgtcgtcggctgcataaagagccgggcgtgtaaggcttctaactaaaaaaaaacacaaaaccattcgcgctgcatcgaggcggcaagggaatgaatccctgggagcgtacaaaagtacgtgaccagggtgagtgagcgcagccaacaaagaggcagcccgaagggtgaagtgttcaaagaaaagcaatgatctcaggagatagaatgatgattactctgcgcaaacttccactggcggtcgccgttgcggcaggcgttatgtctgctcaggcgctggccgttgatttccacggctacgctcgttctggtatcggttggaccggcagcggcggtgagcaacagtgcttcaaagccacgggcgctcaaagcaaataccgtcttggcaacgaatgtgaaacctatgcggaactgaagctgggccaggagttgtggaaagaaggtgataagagtttttatttcgatactaacgtcgcttattccgtaaatcaggaagatgactgggaaagtacctctccggcgtttcgtgaagctaacatccagggtaaaaacctgattgactggttgccgggttctaccctgtgggccggtaagcgcttctaccagcgtcatgacgttcacatgatcgacttctactactgggatatctccggcccgggtgcgggtctggaaaacgttgaccttggcttcggtaaactctctctggcagccacgcgtaactcagaaagcggcggttcttacactttctccagcgatgacaccaagaaatttgctgctaaaaccgcaaacgacgtctttgacgtgcgtctggccggtatggaaatcaacccgggcggcgtactggagttaggcgtggattatggccgcgctaacccgcaggacgattaccgtctggttgatggcgcatcaaaagacggctggatgttcaccggtgaacatactcagtctatctggggtggcttcaacaagtttgttgttcagtatgcgaccgactcgatgacctcctggaacagcggtcactcccagggaaccagcatcgataacaacggcagcatgatccgcgttctggatcacggcgcgatggacttcaacgatgactggggcctgatgtacgttgcgatgtaccaggacgtggatctggacagcaacaacggttctacctggtacaccgtcggtgttcgtccgatgtacaaatggacgccgatcatgagcacccagctggaagtcggttacgacaacgtgaaatcccagcgcaccagcgaaaacaacaaccagtacaaaattaccctggcccagcaatggcaggcgggtaacagcgtctggtctcgcccggcaatccgtattttcgcgacctacgcaaaatgggatgagaactggggctacagcaacacctccggtctgcagactaaagacggcagcggtaacggggtttacacctccagccgcggtaacgatagcgaagtgaccttcggtgcgcagatggaagtttggtggtaacaccgccgtaatcatgtagtgacacggaggggctctgcccctcctgattcttcaggattagcgcgctattgcctggccaccgctaaacctacgctatccgaggtgagaacaatgaaaatgaagaaaactctcgtcgccctgtgtttatccgcaggaatgttggcatgcgcgccgggaacgagccttgctgacgtcaactttgtcccgcaaaacaccagcgcagcgcccgccatccccggcgctgccctgcagcagctcgtctggacgccagtcgatcaatctaaaacgcagaccgttgatttactcacgggcggccagcgcttggatgttgccggcatctccggcccggttgcggcctggagcgttccggcgaatattggcgaactgaccctgacgctcacgagcgaagtgaataagcaaaaacagatttttgcgccgaacgtgctgattctcgatcagaatatgacgccatccgcgttcttccccagcagctattttacctatcagcagcccggcgtaatgaccgcggatcggcttgaaggcgtcatgcgcctgaccccggcgctggggcagcagaagctttacgtgctggtctttacgacggaaaaagatttacaacaaaccacaactctgctggatccggcgaaagcttacgctaaaggcgcgggcaatgccgtgccggatattccagacccgattgcccgccacaccaccgatggcgtgctgaagctaaaagtcaaaaccaatagcggctccagcgtgctggttggtccgctgtttggctcttccggcaatggcccggtgaccgtcggcaataccgccgcgccggttgtcgcgccggccccggctccggcggcgaaaagcgaaccgatgcttgatgacaccgaaacctatttcaacaacggcattaagcaggcggttgcgaaaggcgatatcgataaagccctgaaattgatgaacgaagctgaacgtcttggctcgaaatctgctcgttccacctttatcagcagtgtaaaaggcaaggggtgaccgtctccccgcaatgctgatgtttaggcacagcctttaggtgcgtccgtcagggcgcacttttttttagcgcgccgcagcctctgttgcacggctgttgcgcggatgatcgtatattgacgtttgcccgcccccgatgccccattctgcgatacaatacctttacgttatgtaccggagattcaggcatgccacatcctgcgcttacgcaactgcgtgcgctgcattattttgccgctatgcccccgctggatgcgcatttgcgcgactggctattgctggaagactcaatgaccaaacgctttgagcagcaggggaagaaagtcagcgtcatcatggttaacgaaggttttgttggacgcgacgcgctggccggtgaggcgcccctgttaccgagcgaaccccgctactggctgcgggaaatcattctttgcgccaacggtgaaccctggctggccgggcgcacgatagtgcccgaatcaacgctgagcggccccgaactggcgctgcaacagctggggcaaacgccgttgggccgctatctcttcacgtcatcgacgctaacccgtgattttattgaaattggtcgtcatgcagagctgtgggggcgtcgttcccgcctccggttgagcggcaaaccgctgctgctgacggaactgtttttgcctgcatcgccgttgtattaagaggaaaatgaaatggagtggagtctgacgcagaacaagctgctggcgtttcaccgcctgatgcgtactgacaaaccgattggcgcgctgctgctgctgtggccgacgctatgggcgctgtgggtggcgacgccggggataccgccgctatggatcctcgccgtttttgtcgccggcgtctggctgatgcgcgccgcaggctgcgtggtcaacgactatgccgatcgcaagtttgacggccacgtcaaacgaacggcccaccgcccgttgccgagcggcgacgttagcgaaaaggaggcgcggacgctgtttgtcgtgctggtgctgctttcgtttctgctggtgttgaccctgaacaccatgaccattctgctgtcggtagcggcgctggcgctggcatgggtatatccgtttatgaagcgctatacccacctgcctcaggtcgtgctgggcgcggcgttcggctggtcgatcccgatggccttttcggcggtcagcgaatcgctgccgctgagctgctggctgatgttcctcgccaatatcctgtgggcggtggcctacgatacccagtatgcgatggtcgatcgtgatgatgacgtcaaaatcggtatcaaatcgacggcgattctctttggcgacaacgatcgcttaatcatcggtattttacaggtggcggtactgggtctgatggccgcggtaggctggctgagcgggctgggctgggagtattactggtcgttgtttatcgccgcggcgctgtttgcctggcagcagaagctgatatttaaacgcgaacgcgatgcctgctttaaggcgtttatgaacaataactacgtggggctggtgctatttctcggcctggcgatgggatatatgcagtagcgctgtgggtttcccggcttgcggcgtaaacgccttagccgggctacaaaaccgcagggtccggtagcccggcgcaggccgggacatctctttaagcgttacgcttcatcctgggtaacgctttcaatcgttaatcgcacatccgaagtaatcagatccgccagcatgcggtagatcttcaacgtctcttccggctcggcgtccccggtatcgctgatatagccttcgtcacgcagggtcaacaccagcgtgctgaacaccgccttatcgaagaactccggcgcgttgatgccgtgcagaacggacaggcgctgcgccacggtgcggctctctttctccagcgaactgcggttgattgacgggttagcgctcagcagccagaaggtaatggcgtagcgctgcagcgtttcgcgcgcgcctgcggccagcagctgcagagaacgggcatgagacggattgacgctcacctcatcgtcgttcagggcgatgagtccctgacgctgcatttcagcgatcagcgcatcgacgacgcccgccagctccgctttttcccagcgcaggaacagctcggccttcaggaacggatagaacatctcgacgtgacgcaggatttcggcgcgggtaatacgacgatgctgagtgacgatggcggctaacagcgacggcatcaccagcatatgggcgatgttgttgcggtagtaggtcatcagcacggcctgctcgcgcggcagaatgatgatatcgccaatggtatctttctcgacttcgaacttgttcatctgcagcgcgtggtcaatcagctcgctggccgaagccgcaggcgtggtcgcatccgctgaatatggcacgttgcgcagcagggcgagatagcactccagctgctcggtgagctgctcgcgggtcagtgaacgctgacgcgatgccagcagcgcggtacagcacaggttcatggcgttagccgcgccggcattattgatgcgcaccatcagatccgaggcgatattattcaccgtcggggtcagccaggaagggcgaaccgcttcgatagggtcgatagactcgcgccagtccggcacatgctggttcagataggccatcagcggcaggggttcgccgaagttaacgtagccctggccgagatttcgcagcttgctcaagccgcgcagcatctgcggcaggctctctttctctttcgtcgcaccgcgtagctctttggcgtaggtaccaacctccatcacgtgctcgtagccgatgtaaatcggcaccagggtgatggggcgattaccgccgcgcagcatcgcctgaatggtcatcgacagggtgccggttttcggatccagcaggcgtccggtacgcgaacgcccgccttcaacgaaatactccaccgaatagccgcggctgaacagctcgccgagatattcgcggaatacggttgagtaaagcttattgcccttgaacgtgcggcgaataaagaacgcgccgccgcgacggaagatcggaccggcgggccagaagttcaggttgataccggcggcgatatgcggcggcaccaggccctgatgataaatgacgtaagagagcagcagatagtccatatggctgcggtggcacgggacataaacgatctcgtggccttcatgcgccagctggcgcacgcgctcggcgttatgcacgttaatgccctgatacagccggttccaggtaaagcccagcacgcggtcggtcaggcgaatcatctcataggagaagtttgcggcgatctcttccatcagggcgatagcgttttgctgcgccttttcatgagaaattttcttgctgcgcgcttcgtcttctaccgcacgggcaatggctttcgaggccagcagtttattaaacagatcctggcgcgcgggcaggcgcgggccgaccgccgccagacgctgacgggcgaagtgcatgcgcgccacgcgggccagcttctgggcgatggttttatcggtaccgtgttcgtccgccatcttacgcagcgagaccgaaggcgagaaacggacaaagctgtcgcggcccagccacagaacggcgaagaatttctgaatgccgttgagcatgcgcagcggcgggttcacctcgcctttttcacgccccggcgcgcgaccgaacatcaccgaaaccggcaccatctgcacgtcaagatcgggatggttgcggtgcaaatccagatagtcgtgaaagagcttgatagactcttctttcggcgtgtaataggtaaacacgcgcggtccgccgtggataaatacgtagcgcggaagcaggccgccgtcgatctcgagcggctccagcgggtccggtaactcatgttccagacattgcgcgcgcagcgtcagcaggtccgccttcgaattgtagggcagaacatacataatgggacgcgaggtatccaggcctaattcctgagcaggttgtgccggaatcgacttgctttttaccagcgcccttaatggtaaattcagtaatttatagtaaattcgttgccagccagacatagacgatgtgaagcctctggttaatcatgcaaatgcgccgcaagaataacagaaagtgcgcaaaatttccgttgtaacgcggcaaacgcgtacactcattgacgtcatttacataaaaaggtttgtttgatggccaataataccactgggttaacccgaattattaaagcggcagggtattcctggaaaggattccgggcggcgtgggtcaacgaggccgcctttcgtcaggaaggcatcgcggccgttgttgccgtggcgatcgcctgctggttagacgtcgatgccatcacccgggtgctgttgattagctcggtcctgctagtgatgatagttgaaattatcaatagcgcgattgaggcggttgttgaccgtattggccctgaacatcacgagctgtcggggcgagcgaaagacatgggatcggcggcggtattgctggcgattatcatcgcgctgatcgcgtggggaacgcttttatgggcaaactaccgctaacgcctggcgtagcggctcgcaaaacggaaagaaactcctgatttttgtgtgaaatatggttccaaaatcaccgttagctgtatatactcacagcataactgtatatacacccagggggcggaatgaaagcgttaacgaccaggcagcaagaggtgtttgatctcattcgggatcatatcagccagacgggcatgccgccgacgcgtgcggagattgctcagcgcttggggttccgttccccaaacgcggcggaagaacacctgaaagcgctggcgcgtaaaggcgcaatcgagatcgtttccggcgcctcccgcggtattcgtctgctgacggaagaagaaacgggtctgccgcttattggccgcgtcgcggcgggtgagccgctgctggcccagcagcatatcgaaggtcactatcaggtcgatccggctatgtttaagccgaatgccgattttctgctgcgcgttagcgggatgtcgatgaaagacatcggtattcttgatggcgacctgctggccgtccataaaacgcaggatgtgcgcaatggccaggtggttgtggcgcgcatcgacgaagaagttaccgtgaagcgactgaaaaagcagggtaacgtcgttgaactgctgccggaaaacagcgaattctcgccgatcgtggtggatcttcgcgagcaaagcttcactattgaaggcctggccgttggcgttatccgcaacggcaactggcagtaatctcttcacctcgcggcatcatcacctgatgcatgatgctgcgccgtttttcctcatttgggctctttctccatgctttttaacgccgccgacaaagccctgtggcgcttagcgctgcccatgatcttctccaatatcaccgttccgctgctggggctggtggataccgccgttattggccatctcgacagcccggtttatctggggggcgtggcggttggcgcaacggcgaccagcttcctctttatgctgctgttgttcctgcgaatgagtaccaccggactgacggcgcaggcgtttggcgcaaaagatccgcagcggctggcgcgtgcgctggtgcagccgctgggtctggcgctggccgccggggcggcgattgtgctcttacggatgccgttaatcgacctggcgctgcatatcgtcggcggtagcgaagccgtgctcgaacaggccagacgcttcctggagctccgctggctaagcgcgccggcatcgctggcgaatctggtcctgctgggctggctgctgggcgtgcagtacgccagagcgccggtgatcctgctggtagtcggcaacgtcctcaatattgtgctcgatttatggctggtgatgggcctgcatatgaacgtgcagggggcggcgctggcgacggtcaccgcagaatacgtcactttctttattggcctgctgatggcgagacgcgtgctggcgctgcgcggcgtttccctgtcgatgctgaaaaacgcctggcgcggcgatatacgccgcctgctggcgctgaatcgcgacatcatgctgcgctcgctgcttctacagctctgcttcggggcggtgacggtatgtggcgcccgcctcggtgccgatatcgtcgcggtcaatgcggtcctcatgacgatgctgacctttaccgcctatgcgctggacggttttgcctacgccgttgaggcgcactccgggcaggcctacggcgcgtgcgacgacagccagctgcttgccgtctggcacgcggcctgccgccagtcagggatggtggcgctggcgtttgcgctgatttacgggcttgccggtgagcagattatcgctttgctgacctcgctgccttcgctgcagcagctggccgaccgctatctggtctggcagatgatcctgccggtcattggcgtctggtgctacctgctggacggcatgtttatcggcgcgacgcggggggcggagatgcgcaacagcatggcggtagcggcggcggggtttgccctgacgctgctgacggtaccgacgctcggcaaccacggactgtggctggcgctgacggcctttctcgctctgcgcggcgtttctctggcggttatctggcggcgccactggcagcgcggaacctggttttcgtaatgcatttggtgcatatgatggttaaagattccgaataataaatcttactcagaatactcatctatagttaagtcatgtccggcacacagcgggctgttcattcaccgaacgataaccgaacgatgaggaatgcatgatgaataaagacgaaatcggcggtaactggaaacagttcaaaggtaaagcgaaagaaaaatggggcaagctgaccgacgatgacatgaccgtcattgaaggcaaacgcgaccagctggtgggcagaattcaggaacgttacggttacgccaaagaccaggcagagaaagaagtgaccgactgggaaaccaaaaacgactatcgctggtagcgaaaacgccgtgttttaacccaccgttattgcctacacccttgattcccgctgcggctaacgcctcagcgggctttctttttgatctggatggtatggtcgtggtggcagtggcccggcgtactgcaggattcaacctcgacgcaggcggcgcacaggccgtgagcctcaatgacgttgtggcgcagggcgaatcccattcttgccgccagcgtatgcataatatcttcgacgccttccgcacactcttctttgacgccgccgcagcggtcgcagataaacatcgccgagctgtgggtcggctgatcgaaaaggtgacacagcacgtagctattggtggattccaccttatgcacgaacccttgctcgagtaaaaactccagcgcccggtacaccgtcggcggtttcgcctgaggctctttttcacgaaggagatcgagcaggtcgtaggcgctgattgccccttgctgcaggctcatcaaacgcaatacttcaaggcgctgcggggtcaggcgcacgccacgctgcgcgcacagcttttcagcatgcgctaacatttgttgcgaagtggtcttatccatgagcgtcctctggttgcgtgaatctgaaactgttactttatcacgataccggtaaaacgccgagacccggcggactatacccgtcacacttcacgttacctgcgcgctggctgcgccagttcgtcccagccgcgctcctggggtcgctcaaccttgccaccttatgctatacctgatgcatctcattttcgggagaaaacgatgaaacgacctgactgcattcgacactggcgtgaactggaaggcgtggatgattccacctaccccgacagtactgagcttttctccatcggcgcgccgctggcgcggggcctgcggctgaatcgcctggggatccaccatgagcgtctaccgcccggacgccgaacctcttatccgcatgcggagagcgacgaagaagagtttatctacgtgctggaaggctatccggaagtgtggattaacggctacctctggaagctggagccgggggatagcgtcggctttcctgccggaaccggcatttgccacaccttcctcaataacaccgagcaggaggttcgcctgttagtcgttggcgaggcaaacaagaaatttaatcgcatctactacccgcttaaccccggctatgccgccacgcgtcaggatcgctgggttgaccatccgccgcagttttttggccctcacgacggcaagccgcggaaaatatagcgtttattgcgggataaaaaaggtgagcgctgacgctatgcctcagtggtttatctttgtgctatagtagcgcccctttttacccggatgcttatttattcgccatgatgtcagactcaacgcctactgctttcgccgctcaccgtttttccatcgcgccgatgctcgactggaccgacagacactgccgttattttctgcgtcagctgtcgcgccacacgctgctgtataccgaaatggtgaccaccggtgcgattattcacggcaagggcgactatctggcctacagcgaagaagagcatccggtcgccctgcagctcggcggcagcgatccggctgcgctggcgcactgcgcgaagctggcgcaggcgcgcggctacgatgaaattaacctgaacgttggctgcccgtccgatcgcgtgcagaacggtatgtttggtgcctgcctgatggggaacgcgcagctggtggcagactgtattaaagccatgcgcgacgtcgtgtcgatcccggtcacggtgaaaacccgtatcggcattgatgaccaggacagctacgggtttctgtgtgattttatcgaaacggtatccgtgaaaggcgagtgcgagatgtttatcatccacgcgcgcaaagcgtggctttcggggctaagccccaaagagaaccgcgagatcccgccgcttgactatccgcgcgtttaccagctgaagcgtgattttccgcatctgaccatggcgattaacggcggcattaagtcgctggaagaagcaaaacaacatcttgcgcatatggacggcgtgatggtgggccgtgaagcctatcagaatccaggcatactggcgtcggtggatcgggaaattttcggcgtggaaggcatcgatgctgacccggtttccgtggtccgggcgatgtatccctatatcgaacgcgagcttagcaacggtacttatctggggcacgtaacgcgccatatgctcgggctgtttcaggggatccccggggcgcgccagtggcgtcgctatctgagcgaaaatgcgcataaagccggggcggacatcaacgtgctggaacaggcgctgaaactggttgccgacaagcgttagtttttcactaaaacctggtcaaattcaccacgccctgtacgtatcgtgccgggcgtttttgttattattcaatatgttatatttggcacgatttttgtaatatccgctaaggtagataaaatttctttaggggaaagacgatgctggaactcttattcgttattggcttttttgtcatgttattggtcaccggcatttcactgctgggtattattgccgcgattgttgtcgcgaccgcgctgatgtttgtcggcggtctgtttgcgttaatgattaaactgctgccgtggctgctgctggccgttgttgtggtttgggtgattcgggcgataaaatcaccaaccgacaaccgttatcgcgctaataaccgctggcgctactaaggtattgagcggtatgtcacaacctgaagatttttgcataaaacagcgtaggctttgcttattaaatctgtcactattagcgggttaacgaattcatcgtgctgtaccctacatacagccgaacaaaaaaagtaagggcttcccatgtggaagccctaaacttttcttcttttcccgtcatacttcaggctacaggggcgttggttgcttgcattcaccccggtcacttactgttgtaagctcctggggattcattcacttaccatcttcctgtagcccgaattatttagggaaaagccattactatggcaagagcaaacttgaaccctgcgtcgcccggctttccagcacctcatgcgcgcgtctggcgtcggttaacgcatatttttggctctccgcgacatccacttttatcacgccgctggcgatcagcgaaaacagttcgttgctggcttccgtcagctcttcacgcgtggtgatatagccctgcagagaagggcgggtgacgtacagcgaacctttttggttgaggatcccgagattgacaccggtcaccgggccggaggagttgccgaagctcaccatcagcccccgacgctgcaggcagtcaagggaggcttcccaggtatctttcccgacggaatcgtaaaccacgtggactttcttaccgtcggtgatctctttcaggcgctcgacgatattctcttcgcgatagttaatgatctgccaggcgccggcctgtttggcgcgttcagctttttgcgcgctgccgacggtaccgatcagcttcgcgcccagcgctttggcccactgacaggcgatgagcccgacgccgccggccgccgcatgaaacaagaacggctcgcccgctttgatctcgtaggttttccgcagcaggtaatagaccgtgagccctttcaggaatgaggccgccgcctgctcgaaagagatcgcgtccggcaagatggcggccttatccgcgggcacgttgtggacggtgctataggctcccagcgccgattgcgcgtagaccacccgatcgccggctttgatatgtttcaccccgctgccgactttgcttactacgccagcggcttcggtacccagaccgctcggcaatgacgggggcgggtagaggccgctgcggatataggtatcaatgtagttaatgccgatggccttattctctacctgaatttcgtgctctgcgggatctttcggcgtgaactccagcgcttgcagaacatcaggccctccgtgctggtgaaattcaattcgtgttgccatgcttcctccagaaatgtggtaatctttcgacccattcactatctcggtaactccattcactatggcaggaaataaacccttcaacaaaccacagactgaaccccgcgagcgtgattatcagctcgatgggttgaaggtcccgccgcactcgattgaagcggaacagtcggtgttgggcggtttaatgctggataacgaacgctgggacgacgttgccgagcgggttgtttcggaagatttttatacccgtccgcatcgccatattttcaccgaaatggcgcgcctgcaggaatcgggcagcccgattgacctgattacgctcgccgaatcgctggagcgtcaggggcagctggacagcgtcggcggcttcgcctacctggcggaattatcgaaaaatacgccaagtgcggcgaacatcagcgcttatgccgatatcgtccgcgaacgtgcggtagtacgcgaaatgatctccgtggcgaatgaaatcgccgaggccggtttcgatccccagggccgcaccagcgaagatctgctcgacctcgccgaatcccgggtgtttaaaattgccgaaagccgcgcgaataaagacgaggggccgaagaatatcgccgacgtgctcgacgctaccgtggcgcgtattgaacagctcttccagcagccgcatgacggcgtgaccggggttaacaccggctatgacgatctcaataaaaaaaccgccggtcttcagccgtcggacctgattatcgtcgccgcgcgtccgtcaatgggtaagacgacttttgcgatgaacctcgtggaaaacgcggcgatgctgcaggataagccggtactcatcttcagtctcgagatgccttcggagcagattatgatgcgttctctggcctcgctgtcgcgcgttgaccagacccgcattcgtaccggccagctggatgatgaagactgggcgcgcatttccggcaccatgggaattctgctggaaaaacgtaatatctatattgatgactcctccggcctgacgccaaccgaagtgcgctcccgcgcgcggcgtatcgcccgcgagcacggcggcatcggtcttattatgatcgactacctgcagctgatgcgcgtgccgtcgctctccgataaccgtacgctggaaatcgccgaaatttcccgctcgctcaaggcgctggcgaaggagctgcaggtgccggtggtggcgctgtcgcagcttaaccgctcgctggaacagcgcgcggataagcgcccggtcaactccgacctgcgtgagtccggctccatcgagcaggacgccgacttaatcatgtttatctaccgtgatgaggtttatcacgaaaacagtgatttaaaaggcatcgctgaaattattattggtaaacagcgtaacggccctatcgggacggtgcgcctgacgtttaacggtcagtggtcgcgttttgataattatgctgggccacaatacgacgacgaataaatctccgtcatccttcatgccgcagatgcgttgactacgcctgttcaccccggtcacttagtttactaagctcccggggattctcaggcttgtcgccttcctgcaacacgaaggatttaggagattcttttattaaggaattcaaatgcaagcggcaactgtaatcattaaccgccgcgctctgcgacacaacctgcaacgtctgcgtgaactggcgcccgccagcaaactggttgcggtggtgaaagcgaacgcctacggacacggtcttcttgagaccgcgcgaacgctcccggacgccgatgcttttggcgtcgcccgtcttgaagaagccctgcgcctgcgcgcgggcggtatcccccagccgatcctgctgctggagggattctttgaggccgccgacctgccggtgatctccgcccagcgcctgcatacggcggtacacagcccggagcagctggctgcgctggaggaagcggatttacccgagccggtaaccgtatggatgaagctggacaccgggatgcatcgattaggcgttctgcccgaacaggccgaagccttttatcagcgcctgagccagtgtaaaaacgtccgccagccggtcaatatcgtgagccattttgcccgtgcggatgagcctgagtgcggcgcgaccgaacgtcagctggatatctttaccaccttcacggaagggaagccggggctgcgctcaatcgctgcatccggcggtatattgctatggccgcagtcgcacttcgactgggcgcgtccggggattattctctacggcgtatcgccgctcgacggtggatccaccggcgcggattttggctgccagccggtgatgtctctgacctccagcctgatcgcggtccgcgagcataaagccggcgagccggtgggctacggcggaacctggatcagcgagcgtgatacgcgtttaggcgttgtggcgatgggctacggtgacggctatccgcgcgccgcgccgtccggcacgccggtactggttaacggccgggaagtgccgattgtcggacgcgtagcgatggatatgatttgcgtcgatctcgggcctgaagcacaggaccacgctggcgacgcggtcgtgctgtggggcgaaggcctccccgtcgagcggattgccgaaattacaaaagtaagtgcttacgaacttattacgcgcctgacttcacgggtatccatgaagtacgtggattaatgtcagccagcgcgctttcccccggtggcggctgacgcctcatcggggctacgggccggtagcccggataaggcggtttaagccgccatccgggatgggcgttcacgttgttgcgtcaaatccagcccgttctgttttatccgccaacatcccctcgaccttctttcacatccagtttattgtgttataacgagcccatgtaaacctggagaaacatcgcgtgtttcagaaagttgacgcctacgctggcgaccccattctctccctgatggagcgttttaaagacgatccgcgtagtgacaaagtaaatctcagcatcggtctttattacaacgaagacggcatcattccgcagctgaaggcggttgccgaagcggaagcacgtcttagcgcccagccgcacggcgcctcaatctatttaccgatggaagggctgaacacctatcgccacgcgattgcgtcgctgctgttcggggccgatcatccggtactggcgcagcatcgcgtagcctctattcagacgctgggcggctccggagcgctgaaagtcggcgcagacttcctgaaacgctacttcccaggctcgcgcgtatgggtcagcgacccgacgtgggaaaaccacatcgctatatttgaaggggctggattcgaagtaagtacttacccttggtttgatgataaaaccaatggcgtgcgtttcgcggctttccttgaaaaactcaatacgctaccggaacgcgatatcgtgctgctgcatccctgctgccataacccaacgggagccgatcttaccaacgctcagtgggatcaagtggttgaggtgctgaaagcgcgtaatttgattcctttcctcgacatcgcctatcagggcttcggcgctggcatggaagaggatgcctacgctatccgcgccatagcgaacgccgggatgcccatgctggtcagcaactcgttctcgaaaatcttctccctgtacggtgagcgcgttggcgggctgtcgatcgtctgtgaagatactgaaaccgcggggcgcgtactggggcaattaaaagcgaccgtgcgtcgcaactactccagcccgccgaactttggcgcgcaggtggttgcagcggtgttgggcgacagcgcgctgaaagcctcatggctggcggaagtggaagggatgcgcacccgtattctggccatgcgtcaggagctggttgatgtgctgaaagagacggttccgggcggtgattttgactatctgctcaagcagcgcggcatgtttagctataccggtttcagcgcggcccaggttgaccgcctgcgcgatgagtttggcgtctacctgattgccagcggccgcatgtgcgtcgcggggctgaatgcaggaaacgtgcgccgcgtagctcaggcgtttgctgcggtaatataagttcttcctgaccttttgcccgcgccaaatcatgacgcgggcaattcgcttcccgaagtgtgatcattctctttttatatgacatcagagcagaaaaaccttcctatccgccttcgcggggggtaaggtctgggtgcattaataagcgtacacattattgaaaattataacgattcgattatttagggaaaaatatgcgcaagatcaccctggcctttggggccgtctgcttactgttcacgctaaatagctccgtcgttgctcgcgcctccacaccgcagccgctgtggacgggcaccaatatggcgaaactcgccgaacaggcgccgatccattgggtttccgtcgcccagattgaaaatagcctgctgggacgccagccgatggccgtcggttttgatattgatgataccgtcctgttctccagcccgggcttctggcgcgggcagaaaacctattcccccggcagcgatgattacctgaaaaatccggagttctgggaaaaaatgaacaacggctgggatgaattcagcatgccgaaagaggtggcgcgccagctgattgcgatgcacgtaaagcgcggcgatagcatctatttcgttaccggccgtagccagaccaaaaccgaaacggtatcaaaaaccctgcaggatgattttctcatcccggcggcgaatatgaacccggttatttttgccggcgataaacctggccagaacaccaaaacgcagtggctgcaggagaaagggatcaaagttttctacggcgattcagataacgatatctccgctgcccgcgaggtgggcgcgcgcgggatccgtatcttgcgggcctcaaactcttcctataagccgctgccgatggcgggcgctcagggtgaagaggtcattgtgaattcagaatattaagctgcccgccggcttaatcatcaatcgctaaaacggcagccggcacgctgccgtttttttgtgcaaaatagcgtgccaaaggttttaccttttcgcttattgctgcacacttaggaaggttcattagtaaaaggagtggtttatgtggcatcagcaaaccctgacgttaggcccgaaagcacggggcttccatctggtcactgatgaaattctcgggcaaatccgcgaaatatcgcgggtgaaaactggcctgctgcatttgctgctccagcatacatctgcttccctgacgctaaacgaaaactgcgatccgaccgttcgcttcgatatggagcagcattttctgcgcgccgtaccggataacgcgccgtatgaacacgattatgaaggtcctgatgacatgccctcgcacattaagtcgtcgatgctgggcgtatcgctgatgctgcccgtacgggatggcagcgtcaggctggggacctggcaggggatctggctcggggagcatcgtattcatggcggatcgcgccatatcatcgcgacgctgatgggggaataaaaatgacaatttcggatttattgcagtactgcatggcaaagccgggcgccgaacaaagcgtacatagcgactggaaagcgacgcagatcaaagcggcggacgtcctgtttgcgatggtaaaagaggttgaggacaaccggcctgcggtatcgttaaagaccagccctgagcttgcggaactgttgaggcagcagcatcgcgatgttcgccccagcaaacatctcaataaagcccactggagtacggtgtttcttgacggctccctgcctgattcacaaatttattatctggtggatgcttcctaccagcaggcgcttgattcgctttccgaggctaagcgtaagctgttgccatagcgctaaattctgcccagcagcgccagcagggtcacatcaaacagacgaagcagcgtggactgcagatgcgcctgcatggcgatctgttcgttgttagcgcgaatgctggcaatatcgcgctgcccttgcaggagcagaatgaggtcgtcctgacttaaccagccgcgcgctttctcctgtaacgcctgaagcgtgagcattccggcgtcgcgaatgtcgctgtcttcatcatttacaatcgcatgcataagctgcaaccactctgccgtattcacgccggcgccggccagctgggcgcttaactcttctatggtggacatgcttatctccctgaacgctgttgttcgccgttgatggcctgctggtaaagtttttccgtctgttgcgccagaattccggcctcgaaaggcatcagcgctctctcctgggggacgacgcgccggtacagccgctgataatttttctccagcacgtgaagattactctgccgtagcgcatcgctatcgcttaacgccaggctgaatagcgggcgaatctggcgatcctcgtaactgagcaagcgttggtcgagtggcgctgccgccgcgtcgctgatgaactgcagatgaagctgttcaagcatcagcaactgctgatgagccgtgctgctgtagccgtctatccagctgcaggcggtcagcgcgaataacgccgcgacgagcgtaaatcgataaagtccgtgctttaagtacatgatgcatcctgcaatttatggcggtggtgctatctgatgacagatgccgtccggccgcaaatcacaaaatatcagcgggagaaaatgagaggaaatgaggcctcttcccgggacgggaagaggcagatgagattatttcagcatgggcttgaggaagcgagccgtataggaggcctcgcactcggcgaccgtttccggcgtaccggaaacgaggatctctccgccgccgcttccgccttccggcccaaggtcaacgatccagtcagccgtcttgatgacatccaggttgtgctcaatcaccacgatggtattcccctggtcgcgcagctggtgcagaacctccagcagctgctgaatatcggcaaagtgcagaccggtggtcggttcatcaaggatatacagcgtttgcccggtaccgcgtttggacagctcccgcgccagcttgacgcgctgggcctcgccgccggagagcgtggtagccgactgaccaaggcgaatataggtcagaccgacgtccatcagcgtttgcagcttacgcgccagcgccggaaccgcatcgaagaactcacgcgcttcttcaatggtcatatccagcacttcatggatcgttttgcctttgtacttaatctccagcgtttcgcggttatagcgtttgcctttgcactggtcgcacggtacgtagatatccggcaggaagtgcatctcgactttgatcacgccatcgccctggcaggcttcacagcgaccgccgcgcacgttaaaactgaagcgcccgggcgtgtagccacgcgaacgtgattcaggtacgccggcaaacagttcacggaccggcgtaaagacgccggtgtaggttgctgggttagaacgcggcgtacggccgatggggctctggtcgatatcgatcactttgtcgaaatgttccagcccctgcacgtcgcggtaaggtgccggttccgcgatggtggcgccgttgagctgacgttgggcaatcgggaacagcgtgtcgttgatcagcgtggatttacccgacccggaaacgccggtgatacaggtgaagaggcccaccggcagcgtcagcgtcacgtctttcaggttgttgccgcgcgcgccggacagcttcagcactttctccggattggcgggtacgcgctgtttcggcacttcgattttacgcttgccgctcatgaactggccggtcagcgattccggcaccgccataatatcttccagcttgccttcagccacgacctgaccgccgtgtaccccagcccccggaccgatatcgataacgtggtcggcggcgcgaatggcgtcttcatcgtgctcaacgacaatcacggtgttgccgaggtttcgcaggtggatcagcgtgcccagcaggcgttcgttatcgcgctggtgcaggccgatagagggctcatccagtacgtacatgacgccgaccaggcctgcgccgatctggctggcgaggcggatacgctgcgcttcgccgccggagagggtttccgccgaacgggagagcgtcaggtagttcagaccgacgttgacgaggaatttcaggcgatcgccaatctctttcagtactttttcagcaatttgcgcacgctggccggagagcttcaggttgttgaagaagtccatcgcgtggccgatgctcatatccgagatggtcggcagcggggtattctccacaaacacgtgccgcgcttcgcgcttcaggcgggtcccttcacagctggtgcagggacggttgctgatgaatttcgctaactcttcacgtactgcactggattccgtctctttataacggcgctccatattgtgcagcacgccttcgaacggatggcggcgcaccgaggtatcgccgcgatcgttcatatatttgaattcaatattctctttgcctgagccgtacagaaccactttttgtacgctgctattcagcgtgccccagggcgcttccacatcgaattcataatgttccgccagcgacttcagcatctggaagtagtaaaaattgcgccgatcccagccgcgaatcgccccgccagccagcgacagctctgggttctgaatgacgcgttccggatcgaaatactgctggacgccgagaccatcgcaggtcgggcaagcgccagccgggttgttgaaggagaacaggcgcggttccagttcgcgcatgctgtagccgcaaatcgggcaggcgaagttggcggaaaacagcagctcttcggctttcggatcgtccatattggcgacgatggcggtgccgcccgacagctccagcgcggtttcaaaagactcggccaggcgcgtgctgagatcgtcgcgcaccttaaagcggtcaatcaccacttcaatggtatgtttcttctgcagctccagcttcggcggatcggagagatcgcagacctcgccgtcgatcctcgcgcggatgtagccctgcccggcgagattttccagcgttttgttatgctcgcctttgcgctctttaatgatcggcgccagcagcatcaggcgctggccttctggctgggagagcacgttatcgaccatctggctcacggtttgcgccgccagcggaacgtcgtgatccgggcagcgcggctcgccgacgcgcgcgtacagcagacgcaggtagtcgtgaatttcggtaatggtgcctaccgttgaacgggggttgtgggacgttgatttctgttcaatggaaatcgccggcgacagcccttcaatatggtcgacgtcgggcttctccatcagcgacaggaactgccgcgcgtaggcggagagcgactcaacgtagcgacgctgcccttcggcatacaacgtgtcgaaagccagtgaggatttgcctgaacccgaaagcccggtgacgacaatgagtttgtcgcgcgggatgacgaggttgatatttttgagattgtgggtgcgggcgccccgaacttcgatcttatccattcacctttcccggtagatacgcggattgcctggtttgttagaaggacaaacggcagaaacggctaattatgacacaatttaacctgtttgaatatacagtattggaatgcattttccggtgggatgtgtaaaaatgtcgcaccgcgagagttatctggaacctacttcccagctatcaacatagcacctggaaatggtacactcgcgcgtttacactattaagaaacgcattcaggagacacaaacatggccagcagaggcgtaaacaaggtgattctcgtcggtaatctgggccaggacccggaagtacgctacatgccgagtggtggcgcagttgccaacattacgctggctacttccgaatcctggcgtgataaagcgaccggtgagatgaaagagcagaccgaatggcaccgcgttgtgctgttcggcaaactggcggaagtggccggcgagtatctgcgtaaaggttctcaggtctatattgaaggccagctgcgtacccgtaaatggactgaccaatccggtcaggaaaaatacactaccgaggttgtcgttaacgttggcggcacgatgcaaatgctcggcggtcgtcagcagggcgcgggcgccccggcaggcggtggtcagcagcagggcggttggggccagcctcagcagccgcagggcggaaaccagttcagcggcggcgcgcagtctcgtccgcagcagcaggcgccggcagccccttccaatgagccgccgatggactttgatgacgatattccgttctaacgaagcgttagcgtcgtaaagtcatctctgaaaaagcccctgttcggggctttttctattttgtcacccaggccatctgcgctatttcactgcgcggcaggtgtggcaggtgtggcaggtgtggcaggtgtggcaggtgtggcaggtgtggcaggtgtggcaggtgtggcaggtgtggcaggcgtggcaggcgtggcaggtgtggctggcatccccactgtcggcacgacctgatttttggaggccgttgtcgcctgctgtttacgcgccatttcatccacgatcagccggtaagcgatgtaatacttatagatattgctgacatagcttacggtctcggagccgatcttctcggcggccaggtactccacgttgccaaaccagacgttcggatcaaaaccgcgctttttggtatccgcccgcagccgggcgatgcgcgcgggacccgcgttataagaagcgaatgagaacagcgccttatcaagctgggtcatcggttcatcgccatagtagcggtctatcatccagcgcatatatttcaccccggcatgaatattggggtcgagctgcttaatatcaccgaccttcagctccttgccggtgctcggcattacctgcataacgccaattgcgccgacgtggctacgcaccgactgatttagccgcgattcctgatagccctgcgcggccatcagcagccagtcaacatcgtagcgatcgccatatttgcggaagatctccaccatggtcagaaatttacgccgctctttttgcgccgccgcgtttttaacgtatctggcatccttcaggtagcgcagcagaatcgtattacccagcttgctgccctgacgattcttgttgatgaattcattaagcaaggccagcagctgcgggctattgttgcgtaccgcccagccgatattgccttcgttgcgcagaatgatgttctgatgaacctgaatgttggggaagacctgtttccagaacagagccttgtggcggtcgacgacggtcaatggaatcaggcccgcgttaagcatctctattagatcttcatcctccagcgcttcgggcgccggttcgatagtgatggggggcagtgattgctgggcaaagcgcgcgttgagcgcgaccaggctctcgtaatagctcgatgaggtacgcacaaagaccgttttgccggaaagctgctgcagattttccactttgggcgagccggggccggaaagaagcagctcctgaacgtgagagtagattggcgcggtaaaggtcatctcctgctggcgagcgggggtaatcgtcaggttagcggcgataatatcccccttaccggcgttaagcgcgctgatgagctggtcgcgggcaatcggaacaaagatgatacggaccttaagatgacgatgtttgagctttttctccttcatcaggctttgattgaggcttcgctcaaactccataaaaatatcgtgcgtagcgccgcgctgcgtccctttgttaataaagaaaaaggttttgctgaaggtggttaatacgcgaatggttcgccggtcgagcatacccggtaaatctcccttccatggctgcagcatatcgtcaacgttgacttccagggcctcgcgctcctcgggttctgacagtttattctctgtggcggcgtaaacggatgtgaagcatagcagggcggcaaggcatgcaagtccgccgacaaggtatcgatagaacgacgacgtattcatggcgcggtgctccgcaggaggatttccttattttagtcaatttctggccgttagcatgcccggcgatcgagaatgtcggccggttaatcagctattttattaattaacaggctcagtatttatagtggaataataaacaaatagatatcggtaattatggagagaatatgctcagattgtgtttttttagtgtggatatattttggttatttaaagtacaaataaggggtaaacgtaaataattatttcatctttttgtttttattgagttatttaaaattattgctgtgatgtataattatccacttgataataaatctcatttctaataacgttgtgtggcacaatactcctattactgctgttcggcgaatgctatcaaagaatagcgcggtgcgtttatttcttcatttttgccagagtaataaatctattttggtcgctcattatttattgctatccctatttaaacgggagggcctgactacgccaaaaaaagagatgttacgccaggcatggaagacatgaccggtgtttatctggcggatgaagaaggcgtgccccgacggctaaaaagaaaaacagggcatattccatgaaatacgattcacactactcgctggccgtgctgatcccgatggccatctggggagggatgctgccggcgcaggccgctgacagcaacacgccagacgatacgaagaaatcagaaacggctacggcaaatgatgacgaaaccatggtggtcaccgcggcggcgcagacgctgcaagcgcccggcgtatcgaccatcaccgctgaggagatccgtaaacatccgcccgcgcgcgatgtctccgagctgattcgtacccagcccggcgtcaacctcaccggcaactccaccagcggccagcgcggtaataaccgccaggtcgatattcgcggcatggggccggagaacacgctgattctggtggatggtaaaccggtgaccagccgtaattccgtgcgctatggctggcgcggcgaccgcgatacgcgcggggataccagctgggtaccggcggaaatgatcgaccatatcgacgtgattcgcggtcctgcggcggcccgctacggtaatggcgcgatgggcggggtggtaaatatcgtcaccaaaccggccaccagcgaatggcatggatcatggaatacctatatgaacgccccccagcaccgtaaagagggcgcgacgaagcggacaaacttcagcctcaacggcccgctatcggatgaggtcagctttaatttatggggaaatctgagcaaaacgcaggccgatgcccaggatattaattccggtcacgaagcggcgcgaaccggtagctatgcgggatcgtatccggctggacgcgaaggcgtagtgaataaagatatccacggtaagctgcgctgggaatttgcgccgatgcaggcgctggagtttgaaaccggctacagccgccagggcaacctgtatgcaggcgatacccagaataccaataccagcacgctggtgaaaagtatgtacggtaaagagaccaaccgcctctatcgtcagacttatggcgtcacgtggaccggcggctgggataacggcgtgaccagcaatacttacgcgcagtatgagcacacccgtaactcgcgtatgaacgagggtctggcggggggaacggaggggatcttctccagcagcgaattctccgatatcgacctgtcggatgtgctgctgcacagcgaggtgaatattccgtttaccctgggattcgagcagaatctgacgctgggtaccgagtggaaccagcagcggatgaaagatggcgtatcgaccacccagtcgctctcttatggctccattgacggtatgtcggcaaccgggcgtagcccctattccagcgccgagattttctcgctgtttaccgaagataatatcgcgctgaccgagagcaccatgctgacgccggctctgcgcttcgaccatcacagcatcgttggcaataactggagcccatcgctgaacctctcgcaggggctgtcggatgactggacgctgaagttgggcatcgcccgcgcctataaagcgccaaacctttatcagctcaacccgaactatattctctacagcaacggccagggctgctatgccagcagctcagcctgttacctgatggggaacagcgatctgaaggcggaaaccagcgttaataaagagattggccttgagtataagcacaacggctatcaggcggggctgacctggttccgtaacgactatcataacaagattgaatcgggctactcggcggtgggaacggccagcaacggcacgaccaatatttatcaatgggaaaacgtaccgaaggcgctggttgaagggctggaaggctcattaaacctgccggtaagcgaaacggtcaactggagcaacaacctgacgtggatgctgcagagtaagaacaagaccaccggcgatcgcctgtcggtgatcccgcagttcacccttaattcgatcgtcagctggcaggtacgcgacgatctttcgctgcagagtactttcacctggtatggtcggcaaaaacctaagcgcttcaactataagggcgaggcggtatccggcagcgagctgaatgaagtgagtccgtacagcatcgtcgggctcagcgctacctgggatgtgaataaaaacctgagcctgaccagcggcgtggataacctgttcgatattcgccactaccgcgccggtaacgcgcagacgacggggaattcgacgaccggcgcctatctgtatggcgcgggcgcggagacctataatgaatcgggtcggacgttttatgtcagcgtgaatacgcacttctgattatctactcaaacacccgccgggatagtgaactattccggctttttatttttatgtcggggaaaaaggccggagatataaatgatgacaaaatctccacggcttctacacaattaactcaacttagcagtttacactgtttcctgttgatcgggtctgcttgatcccggaaacgattaacggtggcatcctgccatttccattctaacgttgtgttcctcttcccccttccattcccaaccgcagcaatgcggaggagggggatcccctatccggagatacacaggattttgcgaaactggccaggcgtaatcgcatagtatcttttaaaggtacggttaaaggcgctgatatcttcatagcccgccataatacaaatatcaacgatgcgaaaagccggtttaacctttaataaatcaagggctaattgcatccgctgttggcgaatataggccattggcgacatattaaaatagtgacgaaacaggcgaaaaagatgccattcagaatagccggaaaagaggctcagcgcccgcatggtgagcctcttttcaagattgttttttatccattgcaccagctcgctaagcactgaacgctgaatttcatttcgtggcatgatatctactcatttcattataatggcaatctggctgcataatttattcactatctcttcattttatctacggggttataggttagtttgtggctgttcctggtttatcccagagagcatcattcctaacaagatctttttccccctttcaaccaatgagaaagggggctttttgttttttaattaaaaaacaaaagatgttgaattttaatgttgtcaggaaatgcttatctgactgggtggaagaaggaaagttccattaaaaaataattttttcaccattctcatatatccattttttctccattttctcgtcataattgcgtgcaattctgcgcctcgttcaggttatttaaaacggcgtcagaatctgtctggcgcaatgaactgcattattcccagcaggtatctgctattgccaaatatcttttagacgacacctccatgctaaaaaaaacgagtctcatcgccggtctattgatttcccctttaacgctttacgcatcaaccgcctatacggtagatgacattcgtttcgaagggctacagcgcgttaccgttggcgctgcgctactgagcatgcctgttcatacgggagaagaggtttctaacgaggatatcagtgattcggtccgcgccctgtacgccagcggcaactttgagaacgtgcagatcctgcgcgatggcagcacgctggtggtacaggtcacagagcggccaaccatcgctaaaatcagcttttccgggaataaatccgttaaggatgatgccctcaaggagaatctggccgccagcggtattgaagaaggcagcgcgctggatcgcaatgcgctcacggaaatagaaaaggggctccaggatttctattacagcgtcgggaaatatagcgctcaggtccatgcagtcgtcacgccgctaccgcgtaatcgcgttgatttaacctttgtctttcaggagggggtatcggcaaaaattgcgcaaattaatattattggtaaccaggcctttagcgcagaaacattgctggaccagctgcagcttcgcgacagcgttccgtggtggaacgtgattggcgataagaaataccaaaagcaaaagatggcggcggatcttgagaccattcgtagctattatctcgatcgcggctacgcgcgttttaccattaactccagtcaggtcagcattaccccggataaaaaatcgctatatatcacgatcaatcttaccgaaggcgatcgttataacgtggccagtaccgtcgtgaccggcgacatggcgcagcataaccaggaaattgaagcgctggtgaagcctttagcggggaaatggtacagcggcgcggaaatcacggcggctgagaacagcattaagacgctgctgggaaaatacggctatgcctggccgcaggttaataccgcgccggatattgatgagacgaaaaaaagcgtcgttttgcatattaacgtcaatgccggacgccgttattcggttcgtcagattcgctttgagggtaacgatacttcccgcgatgcggtgctgcgtcgcgaaatgcgccagatggaaggcgcgtggctgaatgatgagaaggtcgagcagggaaaaacgcggctggatcgtaccggattttttgaaaccgtcgacaagcagatcgttccggtaagcggtagccaggatcaggtggacgtggtctataaggtgaaggagcgcaataccggctcctttaacgttggtctgggctttggtaccgacagcggcgtgagctaccagctcggcgtcactcaggataactggctggggaccggcaatagcgtcagcttcaacggcacgcgcaacagctaccagtcctatattgagctgggagcgacgaacccttacttcaccgtggatggcgtcagcctcggcggcaaaattttctacaacagctacgacgcctcggatgccgattccggaagctacaaccagcaaagctacggcgttggcagtacgctgggattcccgattagcgagaataacgccctcaaccttggcctggactatgtccataaccgcctgaccaatatggagccggagctcaccacctggagctatcttaactcacggggcatctatcctgacgtcgtcaccaaagacggcgacagcggtgcgacctatagcgccaatgactattttgccagcgttggctggagctataacaacctcgatcgcggtttcttcccgcgcgcgggaaataaaagcagcctgaccgccaaggttaccatacccggttcggataacagctattataaagtgactttcgataccacccaatatatgccgctggccgagagcaaaagctgggtatggatggagcacctgcgcgcgggctatgccgatgggctgaacggcaaatcggtgccgttttacgataacttttatgctggcggatcgtcgtcggttcgcggtttttcgtcgaatacgattggcccaaaagcggcttattatcgttgtaatggttctgaaagcagctacagcacctgtccgctggactcatcatccgatgcggttggcggtaacgcgatggcggtgctgaacagcgagtttattgtgccgacgccgtttgtgaatgacaaatatgccgacagcctgcgaacgtcgctattcctcgacgccggtacggtatggagcacctcctggcaaaataccggccagacgctggcggccgggatcccggactatggcgatccgtcacatatccggatgtctgccgggattgcggtgcagtggatgtcgccactgggcccgctggtgttctcctgggccgaaccctttaaaaaatacgatggtgataaagccgagcagttccagtttaatattggtaaaacctggtaatcctgctgcttattatttgaaggagagctcggttatttgtggtaaatgctaaaaatagtaccgcaggctaccgctatgggtagcctgtaattaattgtcagtatattcttatttatgtatattcctgcggggaacgcttctggctattatggttaaccattcattattagaacactatatttaaggtaagccttattgagtacgggtggtattgagtattgtctgatatcacattattaatcgataaccttgcggttagctatcatggatgctatcactatatagagtcatttatcagcaatgcccgcaaggataaaaaatgaaatggactattcataatacgcttgtctgcccgtattccggcgtggctttttcttcgatttccagcctgcggtttttaaagtttattctttggtatgaagccgacattttattactgccgggagagtcgatgaagctctactcgtccagcgtgttaattaacgagcaatatcatgcggtaaaggtttataacatcacgcgatacgatgaagcccagtgggagaaactgcgggagcggccttcttgtccgtatcaatctactgccacgacggcaaacgcctgttcttaccaggcgcactgcgcaataaaacgctgcccgaacaactttccacgcgggctattgggcagtcgtccgtcggccagcggaagcgttataaccagaccataatggtgtcatcgctgcggtgtatatcggtgatgggtttaggctgtcgcagagggggaaatcgcgggtggcggtgctgtgcacctgtccgggcaaccggttcaccgccgtctggtggtccggtcagcgacatcggcgcccggataaggtgggccgacatcaggtcatcatcatcggccattcgggcggagtctggctcatgacttcaatcatcacgtccttgatattgccccagattttcgccacgtccagcagcgtaatgcctaacagaccggtggcgaaccagcaggctgcggccaggcccatacagctacaaatcaccgctaaaccggcataatcgcttttacgtagctgaatgttcaacgagctggccagaaacatcagcactgcgctcacgagtggccagcgcaaaagcacgacactggtagtaatggaagccatcaacctatcctcaacgaaatttgggagcctttgacaaccggatgagactgacgatggaacggcgctctggctatcttcaggcaaacaagatcgtaatgaaacaacgtttttgtttcatcagctaatgtgaactatatcacacttgttcttttattcaccagccaaaaatggtgttttcttgcgcttattagccatgtaaatagcagggttaatagggagggcgcggggctttcttgcaatgtgaaggctgattataagggattatcggcggtttgggttttttaataaggtttatgttctgcggattttattacttattctggctaattatacggataaaccgaatgacatagtggagctaatctcattatgttgagaatgtttctccagtggtcctataagccagtattattcataattcatcgtcatgaggtttttacgtcaaagcgtgggttgctgagatgctccgttcatatcacagtaagcagagtcatcggggctgttcaccttgattaaggcgtatcgcatggataaaaagcggaaatgaatcatagcgcgccgcataaggcgttgagaatatttggcatcgtgctggtcattctgctgccggtgctgctggcgttgtggtttgcgcaaattcgcgccaaagcggaaaccgccgatcagctgaggcttttttctcgactggcgctgcaaaaaacggagatggtgattcgtgaagccgacgaagcgcgcgataaagcccgcttgtatcagggagcgatatgttcaccacagcatcagcaatatttgctcggtattgttcgcggcctgctctatatcgacgatttaatctacgccaacggcacccatttcttctgctccacttcggttcgccgccagacggggtggcaaattccggccgcaacctataccaaaaagccggatgtcgcgatttactactaccgcgagacccctttctaccctggctatgcgatgaactatatgcagcgcggcaactatgtggtggtggttaatccgctctcatacagcgcgttgatcaccagcgaccgcgacctcgcctggggcgtttttgataccaaaacccaccagtttttttccgtcagcaagaatgccgaccccgatgagctgcatcgcctgattcgcgctgaagcgtctttatttcaccaggatggccgcgtttataccatcgcccattccaccgttcgcccgatagccgtcattatgtccacttcgcgcgtcagctattatcagaatttttataatcaggtgaccctgacgctaccgctggggctgatttgcagcgtattgctcctgctggtgtggtcgcgcacccgtcagcagtaccactctccgcggaagatgctgcagcgggcgttaaaccgtcgtcagctgtgccttcactatcaaccggttatcgatattaaaaataaccgctgcgtcggtaccgaagcattattgcgctggccaggctttgatgggccggtgatgagtccggcggagttcattccgatggcggaaaatgaagggatgatcgcccaggtcaccgactatgtcatcgatgaggtattttccgacctgggcgagtttctggcgcggcagccgcatctgtacgtggcgattaacctctccgcttccgatttccattccgcacgcttgattgagcacatcaacaagaagatccagcgctacgcggtcaaggcggaacaaatcaaaatcgaagtgaccgaacgcgggtttatcgacgtggcgaaaacgacgccggtgatccaggcgttccgcgatgcgggatatgaaatcgccatcgatgatttcggcaccggctactccaacctgcacaatcttcatgcgctcaacgtcgacgttctgaagattgataaatcttttgtcgacatgctgacgagcaataccaccagccacctgattgccgagcatattatccagatggcaaacagcctgcatttaaaaatcgtggctgaaggcgtcgaaacggcagagcaggtagcctggctccagcaacacggcgtacagtactgccaggggtggcactttgcgaaagcgatgccgccgcaggagttcatgctgtggctggcgaatgatcgcacctgcctcagcccctatcagccgcgctatcaggcagaaatttgatggcgataggcggtcggcgttcggtcaaattcgcgacggaacacccgcgaaaaggtttgctgcgacacgtagccgagatccatcgcgatatcaaaaatagggcgctgggtggttcttagcgcttccgcagcgagcagcaggcggcgctggcgaatgtaatcgcccagcgtttgatgcatcacggcgcggaacatccgctgcagataccatttcgagtatcccgattttctggcgactatatcaatgttaagtggttgatcgatatgttcatcaatccattcaataagcgtttggataatatcctgatgggacataaagcggcctctctcaattctcgattcgtcgttttgtctgcgggcgagtataattcctcaagttaacttgaggtaaagcgctttatggaaaagaaatcaccccgcatcaaaatgctgctgacgcccggcgaagtggcaaaacgaaccggcgtggctgtctccgcgctgcacttttatgaaagtaaagggctgatccacagccagcgcaacgcgggcaatcagcggcgctaccggcgcgatgtcctgcgcgcggtggcgatcattaagattgcgcaacgcattggtattccgctggcgaccatcggcgacgcgttcggcgtactgccggaagggcataacctcagcgccaaagagtggaagatgctgtcgtcccagtggcgggaggagctggaccggcgcattcataccctgaccgcgctgcgcgatcagctcgatggctgtatcggctgcggctgtctgtcgcgccgcgactgcccgttacgcaacccgggcgataagctgggtgaagaggggaccggcgcgcgattgctggaggatgactaaaaaactaaagcgccacaacagggcgctttagttgttttccggtcttggtctttcgcactatcccgctggtacgcaggagggtttcccccgacgtcggctcacctcagtattgcgcaatctttgatggaggttccggtttgcgccgacaatttaagtgtggctcttttctctgaatttgcctcttcagtttgccgaaaaattcccggcatccgccgcctgttcctatagttaatttgaacaaacagcgggagaggcccatgttaacggtacatcatctcaatcagtcacgatcgcagcgcgtgttatgggcgctggaagagctgcagctgccttatcaggttgtctcttatcagcgtggcaaggatatgctcgcaccggcggaattaaaaagcgttcatccgctgggtaaatcgccggtggttgaggataacggccacattctggcggagtccggcgccattctggaatatttacaggaaacctatgatagcgcccggcgcttaaaacctgagtcggtggaagataagctgcaatatcgcttttggctgcactacgccgaggggtcgctgatgcccctgctgctgatgaagctggtgtttgccagcctgggcaaaccgccggtgccgtttggtatgcgcacgctgggtaatgcgttgggcaagggggtacagaaggcctggcttaaccgccaggtggacacccatgcccgctttattgaagcgcacctttcccgccagcgctggtttgccggcgctgagctgagtatggccgatattcagatgagctttcccgcgatggcgctgctggcgcgcggcggcgtggagaatttaccccatctgacgcagtgggttcagcgcgtggagcagcgcccggcctggcaaaaagcggttgagcgcggggggccgttcaccttacccggcgaataaactattactaaagccgatgaccggggaaaattgctatcagcgcaatacaaaaatgttaccggattgcgcatggacgataacgtttgcgcatcggctggttatttcctgaacgtcataagcgaaatttagcgaaatacgacaaacttcagttgaaaaggcccgtctaaaggctggataatcgtttgcctttttattttgctcatcatttcctctgctggcagaggggagcaaagtcattcttcacaccgtactgtatgcgcggagttaaacgtttgctttttcgcggcccctggcgctgcgattagcacaaggagatcgcgtttagctggcagtggatggtccaccacgcattcggacgaacgataaaaattctcaggggaagttttctatgtctacgccttcagcgcgtaccggcggttcattggacgcctggtttaaaatttctgctcgcggcagcaccgtgcgtcaggaaatcgttgccggtcttaccaccttcctggcgatggtttactccgtcatcgtggtgccgggtatgctcggcaaagcgggttttccaccggctgcggtatttgtttccacctgtctggttgccggcgtcggctcgctggtgatggggctgtgggcgaacctgccgctggcgattggctgcgccatctcgctgaccgcgtttaccgcctttagcctggtactgggtcaacagatcagcattccggtcgcgctgggcgcggtgttcctgatgggtgtcctgttcaccgtgatctccgcgaccggcattcgtagctggatcctgcgtaacctgccgcagggcgtggcgcacggtacggggattggtatcggtctgttcctgctgctgattgccgccaacggcgtgggcctggttatcaaaaatccgctggatggtctgccggtggcgctgggtaattttgatagcttcccggtgattatgtcgctggtcgggctggcggtgattatcggcctcgaaaaactgaaagtgccgggcggtatcctgctgacgattatcggcatctcaattatcggcctgatcttcgatcctaacgttcacttctccggtatcttcgccatgccgtcgctgagcgacgataaaggcaactcgctgatcggtagcctggatatcgtgggcgcgctgaacccggtggtgctgccaagcgtgcttgcgctggtgatgaccgcggtgtttgacgccaccggaaccatccgcgcggtggccggccaggcgaacctgctggataaagacgggcagattattaacggcggcaaagcgctgaccaccgactccctgagcagcgtcttctccggcctggtcggggcggcaccggcggcggtgtatatcgaatccgctgccggtactgcggcgggcggcaaaacgggcctgacggcagtgaccgtcggcgtgctgttcctgctgatcctgttcctctctccgctctcgtatctggtgccggcttatgccaccgcgccggcgctgatgtacgtcggcctgctgatgctgagcaacgtggcgaaaatcgatttcaacgatttcgtcgacgcgatggcgggcctgattaccgcggtctttatcgtgctgacctgcaacatcgtgaccggcatcatgatcggctttgcgtcgctggtgatcggtcgtctggtgtccggcgaatggcgtaagctaaacctgggtacggtgatcatcgccgcggcgctggttatcttctacgccggcggttgggcgatttaacttttcctgctaacaatgggcggctttggccgcccgtttaatttttaagccacatcctgtttccttttgcgttaatctgagtagcgtattatgccgagacatgacgcctcagatgtaaaaaaaagacacgcagcaaacagggaacacatggaaatattctttaccatactcatcatgaccctcgtggtctctctctccggggtggttacacgcgtactgccctttcaggtcccactccccttgatccaaattgccatcggcgcgctgttggcctggcctaccttcggattgcacgttgaattcgaccccgaactctttctggttctgttcattccgccgctgctttttgccgatggctggaagacgccaacccgtgagttcattgagcatggacgagaaattttcggcctggcgctggcgctggtggtggtaacggtggtcggtattggctacctcatctactggattgtaccgggtattccgctgattccggcttttgctctggcggcggttctgtcgccaacggatgccgtggcgctgtcgggaattgtcggcgaagggcgcattccgaaaaaaataatggggattttgcagggcgaagcgctgatgaacgatgcctccggcctggtctccctgaagtttgccgttgcggtggcgatgggcaccatggtctttaccgtcggcggcgcgacggtggagttcttcaaggtggcggtcggcggtattctcgcgggctttgtggtcagctggctgtacgggcgctcgatgcgcttcctcagccgctggggcggcgatgaaccggcaacgcaaattgtgctgctgttcctgctgccgttcgcctcttatctgatcgcggagcatatcggcttttccggaatcctggcggcggtcgccgcggggatgaccattacgcgttccggggtgatgcgcagcgcgccgctggcgatgcgcctgcgcgccaacagcacctgggcgatgctggagttcgtgtttaacggcatggtcttcctgctgttgggcctgcagctgccggacatcctttccagctcgctggtggctgcagaagcggatcccaacgtcgaaacctggatgctgtttaccgatatcgtcctgatttatgccgccctgatgctggtgcgttttggctggctgtggacgatgcgcaaactgagccagcgtttcctgaaaaagaaaccgatggagttcggctcctggaccacgcgcgagctgctgatctcctccgtcgccggcgttcgcggggcgattacccttgccggtgtactgtcgattcctctgctgttaccggacggcaacgtcttcccggcgcgctatgagctggtgttcctcgccgccggggtgattctgttctcactgttcgtcggcgtgattgtgctgccgattctgctgcgccatatcgagtcgaccgaccatgtccagcagcgcaaagaggagcgtctggcgcgggccgccacggcggatgtggcgattgtcgcgattcagaaaatggaagagcgtctggctgcggataccaaagagaatattgataatcagctgctgaccgaggtcagttcgcgggtgattggtaacctgcgtcgtcgcgtcgatggccgcaacgatgttgaaacgtcgatgctggaggagagcctcgaacgccggttccgcctggcggcgctgcgttccgaacgcggtgagctgtaccacctgcgcgccacccggcagatcagcaacgagacgctgcagaagctgctgcacgacctcgatctgctggaagcgctgcttatcgaagatcagtaacgccgtacctgttccccgggtcaggcgttgacgccgcgacccggggacttacttcagccagaacgccttgctgcactccagccacgctcgcgcgctgtgcgacagataaacgccttcccgccaaatcatccccagctcccagcgcagatcgctctgcaacggcatccagcaaaagctctgcgggtcgaggcgctggcaaatcggctccggcaaaatcgcgatgccaatccccgcctggaccatggcggccagaaaatcccactgtccgctgcgtacggcgatgcgcggcttaacttcatgctgagcaaacagccgcatcagctgctggctgagggcgaaatcctcgttgtaaatcaccagcggatgcgcggcgagcgcctgcggcgacaatgagctgaggccctcccattgtgccgttctcggcgtcagtacgcagagcggatggctgaacagagatagcgtcgtcagaccgctggcctcatcaaccggaagcgccgtcatggctaaatccagttcgccgttgctgaccgcctgctgcacggtcaatccgccaaactcggagattttcaactcgatacccgcatagcgctggcgaaagcggctaatcggctcggccatcagcatgccgaccatcggcgggatcccgagacgcagtacgcctttgtgcagatgattaatatcgctcagctccgactccagctggtgaaattcgccaaggatggcctgcccgcgctcgaaaaccacgcgtccggtatcggtcagcagcagccggcgaccgtcgcggatcagcagcgtgcagttcagctcatcttcaaggtttttaagcatcttgctgatggtgggctgcgtgacgaaaagtttctccgccgcgcgggtaaagctttgctggcgaaccacttcgacaaaataacgcagcgttcggatatccataattattccctgagactatacctgtgatgattttaattcatttctgccgcgccgggcggctctctatactgcacgcctgtcttctttttcaggaataccgctcatggcctttgcgccagctcgcgtgacgccctttgttatgcaacgtcttcaggtaccggttcaggtcctgatctacgccggactgttcgtctgcgctgaatatttagttaactggctgcacctgccgcttccggcgaatctggtcggcatgctgatgatgctggcgctgatcgtctgccgggtcattcctttaaactgggtacgcgccggagcccgctggctgctggctgagatgctgctgtttttcgtaccggcggtggtggcggtcgtcaactacgcgcagctgctgatggtcgatggctggcgtatctttctggtgattggcttgagcactacgatggtgttgggcgccacggcatgggtggttgataaagtgtatcgctatgaagtcagcaggatgaaacatgagtgattttcagctgagcctcctgtgccttcttgtcacgctgggactctattttgccaacaagcggctttatcgccgcttccataaactgccgctgatgccgctggttttcaccccgatcctgttggtcatgatgctggtattcggccatatctcttatcaacgctatatgggggagacccactggctgctgtggctgctgggcccggcgacgatcgcctttgccgtgccggtatacgacaacatggcgattattaagcgccactggatgtcgctgacggctggcgtcactaccgcctcggttgtcgcggtgaccagttcggtgtggctggcgcgattatttaccttgcctgatgagatccagcgcagcctggcggtacgctccgttaccaccccctttgcgctggcggcagccaaaccgctgggcggccagccagatttagtcgctctgtttgtcgtggtcaccggggtattcgggatggcggtaggggatgtactgtttctgcgtctttctattcgcgagggaatggcaaaaggggccggattgggggcggcatcgcacggcgccggcaccgcacgatcctacgagcttggccctcaggagggcgtggtcgccagcctggtgatgatgctatccggagtggtgatggtgctgaccgcgccgctggtgagatgggtcatgttctgaacccctttgttattagtgaacgcatactcgctaaggtactttttccatatctcacgactatttatattcctatgaatagtcttttcatcttatcgatatgaacggttaattaaatattcgtatttgtaggataatccgatgatgccttaggtgatatccttatttgccttcctgcttaaattgtaattaaatgtttctgattgaggagggtttaatatttaagagaaatataaatataaggaataatgttttttgtgaatgttttttatgtttaacgttatgaatttatgtggttatttatgatgtatatcttgtattgattggttcagggctattattcatttgagataattcatatgcgcttgttgagtattttctctattttagatatcttacttacgtgagcttctattattgaatggattcatgtggaaattaagctcttgtatttataggttagtcatcttaaatgcaggttattcactccccatgcaccttatcagcttataccttcgctgatgtctggcttcattctctaataaaagccataaaacaattgatggattgattgttaatcttaataaacaggggaataccaatgaacttcagtaccaaaacgcttgccaaaatattagccttatctgccggctgctctctggttactctggctcaggccgcgaataccattacttttaccggtaaggtctcagataccacttgtacagcgactatcgataatggcgtttcgtctattgagatggggacctcctcagtcgccgatctggatacgaatacctacggggcggcgaagagcttttctttcactttaaccggatgccctaagaccacagaaggcggtaacgccttggccagagtgacgtttggtggcgaagcggacacgacgaatagcgattacttcaaaaaccaggcggcggaaacacccgctaccggcgttgcggtggcgatttttgataataagggtgccctgcttaagaacaatactgaaggtgcggatgtggatatttcctccggtgccgcgacgattccttttaccgttaaactggctaaatctggtacggctactcccaccaagggagcggtgcagacaaccgtaacttacaacgttacctattattaattcagcattagataaaagggaaagcttctgctttccctcactggacactaccatgaaaaaattagcttactttatctgtttttgttcctgcctgtctgtcgcgcaggccagcgtggtggtgggcggtacgcgagtgatattcgatggtacgcaaaaggcagcgacggtatctgtgcaaaataaagataacgttacaaatattgtccagtcctggatcgcagttgtggatgaggcatcaccagcaaaagattcctttattaccacccctccgctgtttcgcctgaaggccggcgaacaaggatttgtccgaatcctccgctcaggtaaaccgctgcccgaagagcgagagtctatgttttggctgaatattaaaggcatccccgctatggatagcgcgccggacaaaaatatggtgcagttcgccattaattcgcggattaaactgatttttcggccagctgcattaaaaaatgctattccggaaaagtttgccgaaaagctggagtggtctgccgaaggtagagatattaaagttaaaaatacctcaccgttgtatatgaacttttctgaaattacggttaatggtaagtcagttcctgaagcatggtttgttgcacctttttcaaccataaaaataccggtagcaaatacatccttgccagggaaaaagaaaatcacatggagcgtgatcaatgactatggaatgccgggaccaaaatataccgccatcattcaataacgttggacagaattttacatttctgttgaagagtggctacgtcgccattatttcctgctttgccacccttccgttacccactatcgctggtgagtatttcaatcctcacctattggaggtcaatgaaaccggtacaacttctgtcgacctgagctatatttcccaggaaaccgttcctccgggtgaatacaatcttgatatttatattaaccaagaatttattgcttccgagtcagtcagattcacccaacagagtgagggtaatgacgtttcttcaccctgtatcagcgtcgcgcagctgaaagcgtggtcaatcaaaacggaaaattatcccgagctcacggtcgcgggttcccgctgtgcccgactatccgcaatccctggatggggaaccacggtattactttcacaacagcgcgttgattttaacgtgcctcaggtcgcggtgatgcatcatccgcggggatatgtccctgaaagccggtggcaacagggtattaccgcggggctacttaactataatctctccgggcaaaagaccgatccgcggcacggcggcgaagcgacgtccagccagtttgtgagcctgcagccgggtttaaacgtcgggccgtggcgtttacggaactacagtaccctcaaccataatgatgacggcaaccagtgggactcggtctacagctatatttcacgtgatatccaggccctgaaaggccagctgatcctgggccagacctatacgtcatcaagcgtgttcgacagtgttagcttcaccgggctacagctgaactcagataaagagatgctgccggatagcttgaacggctttgcgccggtcattaaaggcatcgcccgcaccaccgccgacgtgacggtttatcagaacggttacagcatttataaaacaacggtcccccctggcgcgtttgagataaacgatctttacccaaccgggagcgcgggcgatctgaatgtgacggtaaaagagtccgatggcagtgaacagagctttgtggtgccttttgcttcgctggcgattttgcagcgcgagggccagatagattacgccctgagcagcggcaaaacgcgttcgggaagttccggcggaaaagaatatcacttcctgcaatctaacatcgcctggggggcatcgagcaacatcacgctgtatagtggttttcagcaactggagaacaaatacagtaatgttcttctgggggccggacttaaccttggcacgatcggcgcgctctcctttgatgcatcccagtcctgggcagatataaaagagacgccaacgtcgaatcacacgtcatccagcgaaggacaatcttatcgcgtgcgctttagcaaagatattccgcagacgggaaccaacttctccgttgccgggtaccgttattcaacccatggctattactctctgcaaaattttattgataggtcgaatgcgcatagcgggtgctgttcatcaacgggccggactaaagatcgttttgacgcttcagcttctcagattctcgcagggtatggttcactctccctctcactggtcagcgaatcttattgggataattcacgtatggagtcgttgggcgtgagctatagcaactcccttggccgcatttcctattttgttaactactcctgtagccgaaatgtacgaagcacaagccagaatagtgagcgtgctcagaccagcgataatcttgtttcactcacggtgagcgtgccttttggtgcggatatctcggccagctacaatatgaacagcagtcggatgggcgacacgacccatagcctgggtttgagcggatctgcttttgcggatcgttctctgaactggaatatgcaggagggttacaatgccagcgataaaaagacttcaggaaacgtcaatctaaactatcagggttcaaaaggtgaagtcaccgcgggatacggatatgacagctatagcgcccactataattactcgctacggggcgggatggttgctcattccggtggtgtgaccctttctcgttatcttggcgagagcgtggcgctggttgaggcgcctggcgtcagcgatgtggtagtgcgcggacagacgaatattacgaccgatgccttcggatacgccgttgtaccctttgttcgaccgtaccatgaaaataatctctctcttgatgaacagcaggtctcgggagcggaaatcgataatattgtcaaaacggtggttccgacgcgcaatgcgattgtaaaagtcaaatatgatacctggattggctataaggcgatgatgaccctgcattttaataataaagaagtcccttttggcgctattatgacattagataatgaaagccaggaatataaagaaaaacgcagcgctatcgtcggtgattccggacaggcctatctgaccgggctgcctgaaaaaggtcggttgtttgtgaagtggggtgatagccaaaatagccaatgctatgtggactatgatttatcagtcaataaatcggttgatgatatcattttttatgcagcggattgccgctgatgaatagctggataattgccttaatagataaactcaggatggaagcgatgaggataagcaatggcgggatattaacgaagtcgtacgggttatttatcatcagtattggctttgcatcgatatccattaatcccgcctgggcctatgatacgtcgagtagcgtcaattttaatatcaccggtaaaattgaagagcccgtatgcgaggtctcggttaaaccctccagcgcgatcgatctgggtaccgtatcttatcaaaagcttaccaacaaaccgggcgcgagcagtgatgccacgaccgtgtccattgcctttgataattgttcaacgggtacggcgtcagtgacgataacgtttagcggtaattcatttgacagtacttactccagtatttatgagaatgagctaattgacggcgcaaaaggcgttgggctacagctgctaagcgcggtagatcagaaatccctgggaccaaacgacagctatacctatctttttaatgagggtgcagaacctatttttaatatgagtgccagaatgtatacgccgaatggacgagtcacggcgggaaatgtcgcctatacggtcacttttaatgtgtcatataagtgagccgttctcgcgagggagaggtatgaaaaagtctattttattgttgttagcctgcttactaccggcttacagttgggcatgtaaaacgggggcaaactcgggcgatatcgctttaactaatttgcccgcgcagatactggttaatgcgggtagctactcggcggggaccatcctttatgattcaggacagataacgcatccaaccacatctcttacggattgtcggggttggttatatgcactgttcgggtggagctcggggaatgcgggcaccttagtgggggataacatctactcgacctccgtgcagggtatcggtattcgcgtcaaattctggctcaatatcacgggtgaatatggcggtgataccgatgattttaatgctgactacagcgttcaccatatcggtgatgaagacttatatctgggaaaaccaaatggctttcttgatgacaaggcaagcacatattatgccccaacgtaccaggtccagcttgtggcaacggggggggcaattgccagtaatagcacgctgacgctggccgatccgatttccacggtctccattctggatcttgacggaacgatggctatttcccagctgcacgtgacgggttcgacaaaaattaaactgacccctatgggatgctcggttgattcgaccgcgctgaatttccaaatgggctcagtgaaaacaagtgagtttaatgtttctaacaaggtcggatcggttcagcaaacgcttaccctaacctgtgagccgggaactgccgtgacgatgcgcgttacggcgacagaagcagaaggtgataatcccgatcattccgtgattgcgttaacacccggcgaaaacgtagcgaccggcgttggggtacagttgaatcttaataatgcacccctcatcgtgaattattttaactacaaagtatttggaaccacaaaaagaacggaggtaacgaattctggcgcggaggccagctatttgatcttcaccgatcctgataatcccggcggtgcggcggcatcgaacgtcctgacgtttaccgcgaactattacaaaaccggagctaaagtgacgccaggtatcgcgaatgcgagcggaacgataacctttacttatcaataaaatattccccaatcggtaagccgggaaaagagagatgaatgcgccgtattagcttcagcgggctacagcagctatgacagtgtagcagaaaggccatgagccaaacgacagctatacctgttttttcattgaaggttctgagcctattttaaatatggcaggcgggaatattttcgccgaatggacgagtaacggcgaggaatatctcctggacggtcacttttaatgtgtcatataaatgatacgacttttgcgggttttatatgaaaaaaatttttttacttgttctttttttaattttcccgggttatgtgtgggcctgtggctatggattaaattatggtgatgtatcaatcactaatttaccatccaagctattgcttagcgcaggtaattattctcctgggaccgttatttatgattcagggaaaatataccatcccaaaaccagtgttctcgactgtaccggtagtttatatgcccgctttacatggtcacctggcatagcgactacgcttgtcggtaataacatctatgaaacgtcggtgccgggaataggtatcagagttaacgtatggttaaatactacgggggaatatgatggtgtttcatctgtatttaatgtcgataacagtgaacaccatattggtgatgctgattttcctcttgtcaaaccgggcttttttgctttcagtgccagtacgaattattcccctgtctatcagttacagctcgttgctacaggcggaagcattgccagtaatagttctctaagctttaccgacccggtatcaaccgtagcaatgaaagacagcaacggcgaattggttatttctcagctgcatatcagcgggacaacccatattcagctcgttcctatgggatgtaccgccagtacggccgcactgaatttccaaatgggctcagtgaaaacaagcgagtttaatgtttctaacaaagtcggttcagttcatcaaacgctcaccctaacctgtgagccaggtaccttcgtgacgatgcgcgttacggcaacagaagcggaaggggataatcccggtcattccgtgattgcattaacaccgggtgaaaatgtagcgaccggcgttggggtgcagttgaacatctttgacacggcgcttgccgtgaataactcaatctacagagtgtttgcagagtcgaaaagaactacggtaacgaattcagaagcggaggccagctattcgatattcaccgatcctgataatcccggcggggcggaggcatcgaacaccttgacctttaccgcgaactattacaaatacggaaccgaagtgacgccgggtgaagccaatgcgagcggaacgctgacttttagctacaactaatgcatcaacactaccccggccagcaggccggggtacgggcaatcattaatgcgcctgacctttctcgatgccgataccggtctgcgaacggataaactgggcgcggaacagctcgcgttcgcgcgcgccttccgcggagctatcggtggcggagaagaaccagataccgataaaggccacggcgatagagaacagcgccggatattcatacgggaatatcgccttttcgtgaccgaggatctgcacccagatggtcgggccgaggatcatcagaatcaccgcggtcagcagacccagccagccgccaatcatcgccccgcgggtggtcagcttcgaccagtacatcgacagcaggataatcgggaagttacagctggcggcgatggagaacgcgaggccgaccataaaggcgatgttctgattctcgaacaggatgcccagcagaatcgccaccacgccgaggatcagcacggtaatcttcgacaccttcagctcctgacgctcggtcgctcctttacggaacacgttcgcatacaggtcgtgagagaccgccgacgcgcccgccagcgttaatcctgcgaccaccgccagaatagtggcgaaggccacggcggagataaagccgaggaacagattaccgccgaccgcgtccgccagatgcaccgccgccatattgttaccgccgataagctgaccggccgcgtctttgaacgccggattcgcccccaccagcatgatggcgccgaagccgatgataaaggtcagaatatagaagtagcccataaagccggtggcgtagaacacgctcttacgcgcttctttggcgtcgctcacggtgaagaaacgcatcagaatatgcggcagacccgcggtgccgaacatcagcccgaggccgagcgacagcgccgatatcgggtctttcaccagtccgccggggctcattatcgccgagcctttcgggtggaccgccatcgcttcggtgaacagattattgaagctgaagccgacgtgcttcatcaccataaaggccataaagctggcgccgaacagcagcaggaccgctttgataatctgcacccaggtggtggcgagcatgccgccaaagaggacgtaaagcaccatcagcacgccgaccagcaccaccgcaacgtggtagttgaggccgaacagcagctggataagcttacccgcaccgaccatctgggctatcaaatagagcgccaccaccaccagcgaaccacaggcggagagggtgcggatcggcccctgtttaagacgataggacgctacgtcggcaaacgtgtagcgcccgaggttacgcaggcgttcggcgataagaaacagaataatcggccagccgacgaggaaaccgagcgagtagatcagcccatcgtagccggaggtgtaaaccagcgcggaaatgccgaggaacgaggccgccgacataaaatcgccggcaatcgccaacccgttctggaaaccggtgatattgccgcccgcggtgtagtaatcgctgcgcgaacgtacgcgttttgaggcccaccaggtgatatagagcgtcagggcgacgaaaatcaggaacatgataatcgcctgccagttggtcggctggcgctgtaccgcgccggtgagagcatctgcggcattgacggtcaacgggagcgtggcggcgagcgccgtcaggactttcttcatgatgctttaacctcgctgagaatgcttttcgtcatccgatcaaattcaccatttgcccgccagacgtatattccggttaagacgaaagagataacgatcacgccgataccaatcggaataccccgggtgacgctggttcccgcatgcagcggcgtgcccagccagccgggggcgaaggcgataagcagaataaagcccacataaatcaccagcataatcagtgacaggatggcggcaaacctttgccgggctgcaacaagctccttaaaatgcgcactattttctatccgctgacaaatctgttcgttcatcgtagcgtctccagaggttccctttcgtcattcacgcgccggtcgtcggcaacactcatccgcccggcagttaactgtcgggaatcagcctgtttaccgctttcctgctacctgaaatccttggggagtcgtaattatatcctctcccctggtggggagagggtgtaggggatcgttggtttacgatggcatagcgatggcctgcttctcttcgagcagtttttccaccacgccaggatcggcaagcgttgaggtatcgccgaggttactggtatcgcccgcggcaattttgcgcagaatgcggcgcatgattttgcccgaacgggttttcggtaacgaatcggtccagtgcagcacgtccggcgtcgccagcgggccaatctctttacgtacccagttgcgcacctcggcgtacagctccggcgtcggctcttcgccatggttgagggtcacgtaggcgtagatggcctgccctttaatgttatgcggaatgccgaccactgccgcttcggcgattttcggatgcgacaccagcgccgattcaatttcggcggtacccagacggtggccggaaacgttcagcacgtcatcgacgcggccggtgatccagtagtagccatcttcgtcacggcgcgcgccgtcgccgctgaagtacatatttttaaaggtggagaagtaggtttgttcgaagcgttcgtggtcgccaaacagcgtgcgcgcctggcccggccaggagtcggcgatcgccaggttcccctcggtcgcgccttccagcggcgtgccttcgttatccaccagcaccggctggacgccgaagaagggacgcgtggcggaaccggccttcagctcgatggcgccgggcagcggggtgatcataaagccgccggtttcggtctgccaccaggtgtccatcaccgggcacttctcgttgccgatcttcttccagtaccactcccaggcttccgggttaatcggttcgccgacggagccgagaatgcgcagggaagagcggtcggtgccttcgatggccttatcgccctccgccatcagcgcgcggatcgccgtaggggcggtataaagaatgttgacctgatgcttatcgaccacctggcacatacgcgccggggtcggccagttcggtaccccttcgaacatcagcgtcgtcgcgccgcaggccagcgggccgtagagcaggtagctatggccggtgacccaaccgacgtcggcggtgcaccagtagatgtcgcccggatgatagtcgaacacgtatttaaaggttgacgccgcatagaccaggtagccgccggtggtgtgcagcacgccttttggcttaccggtcgaaccggaggtataaaggataaacagcggatcttcggcgttcatctcttcgggctggtgttccgcgctggctttttcgatcagatcgctccaccacagatcgcggccttcctgccagtcgattttgccgccggtacgtttgaacaccaccacgttttcgatgctcttcacgtgcggattttttagcgcgtcgtcgacgttcttcttcagcgggatcgcgcggccggcgcgcagcccttcatccgaggtgatcaccaggcgagagttggaatcgatgatacggccggcgaccgcctccggcgagaagccgccgaaaatgaccgaatggatagcgccgatacgcgcgcaggccagcatggccaccgccgcttccggcaccatcggcatatagatagccacgacatcgccctttttaatgcccagatcgagcaggacgttggcaaagcggcagacatcgcgatgtagctcgcgataagtgatgtttttgctctggctggcatcgtcgccttcccagatgatggccgtctggtcgccgcgctccgccagatggcgatcgaggcagttagcggcgaggttcagcgtaccgtcttcataccacttaatggaaatattgcccggcgcgaacgaggtgtttttcacgcgcgtatagggttttatccagtcaaggattttgccctgctcgccccagaaggcgtcaggttcggtgacggactgctgatactgcgcctggtactgttccgggttaatcaggcaacgttccgcaatattagcgggaatagagtgtttatgtatttggctcatggctttttttctcctgtaggttgttaaatatatgtcaaataaacgttaatagtaggggctttggcggctttgtttgctatttggggggcagatcacgcaataattaaattgaatgaaaagcaatcaaatgaaactttgatatgaaataatttctgaattgaatttatagaaaatgaatatattaaatattttttataacaaatacttatgcaacataaggtggggatattagcgggtttatgcataaaaccagagtaaaccgctgttcttaaagacttgcgcagcatgccgtgcaaatgatactgatattgcgcgttaaataaccctataaagcaacgcaacacaattcatacccctttcagtgggtgccattacctcccggaatggcgcttttcatcgaggaagtctgtagtgaagaaaaaaacaaaagtcagcctggcctggcaaattttgctggctctggtgctgggcatacttctgggcagttacctgcattaccatgccgaaagccgtgactggttaatctcaaacctgctgaccccggcaggcgatatctttatccatctgattaaaatgatcgtcgtaccgatcgtcatctcgaccctggtggtcggtattgcgggcgtgggcgatgcgaagcagctgggccgtatcggtgcgaagaccattatctattttgaagtgatcaccacggtggcgatcgtgctggggattaccctggctaacgtcttccagccggggagcggaatcgatatgtcgcagctggcggcggtggatatttcgaaatatcaaaacaccacggcggaagtgcagagccacgcgcatggcctgatgggcacgatcctctcgctggtcccgaccaatatcgtggcctcgatggcgaaaggcgacatgctgccgatcatcttcttctcggtgctgtttggtctgggcctctcctcgctgcctgccacccaccgcgaaccgctggtaacggtgttccgctctatctctgaaaccatgttcaaagtgacgcacatggtcatgcgctatgcgccggtgggcgtgttcgcgctgatttcggtgaccgtggcgaccttcggcttcgcctcgctgtggccgctggcgaagctggtgattctgctttatttcgccattctgttctttgcgctggtggtattaggcatcgtggcgcgggtgtgcggactgagcatctggaccctgatccgcattctgaaggatgagctgattctggcctactctaccgccagctccgagagcgtgctgccgcggattattgagaagatggaagcctatggcgcgccggcgtcaatcaccagcttcgtggtgccgaccggctactcctttaacctcgatggctcaacgctgtatcagagcattgcggcgatctttattgcccagctgtacggtatcgacctctccatctggcaggaaattacccttgtgctgacgctgatggtgacgtcgaaagggattgccggcgtaccgggcgtctccttcgtggtgctgctggcgacgctgggcagcgtgggcattccgctggaaggtctggcgtttatcgccggcgttgaccgtatcctcgatatggcgcgtaccgcgctgaacgtggtgggcaacgcgctggcggtgctggttatcgccaaatgggaacacaagtttgaccgcaaaaaagcgctggcgtacgagcgtgaagtgctgggaaaatttgataaaacggcgcaataaaacagaaagcccggtgacatcgcaccgggctttttcttatcttttactgatcctgtcgaactcttcacagccggtatcaaacccctcctgacagctgacgttgagccagtgcagcgctttctgcttgttgggttcgataaagcctttttccccctgctggaaaagcatcccggcccagtattcagcgtagccggtgcgggagagggcagagctctctttaaaatactgcgtcgcctttacgtcatcttccgggggatgaacgccgctggcgtagatcagccccagcagcatctgggcgtcgacggctgaatcgctttccggagcctgggcggcatgctgtaacagggagatggcgtgcggatagttcggcgtaccggcctgctggttcaccagcacccgggcgaggacaatttctcccgccctgctgccggtctgcaccgacttttccgccagcgctttcgcttggcggtagtcggcctgctgcggattgcggattttgagctgagccagcagcgccagcgcatcgccgtcgcccttgtctgccgctttctgcgcccagtattcagcctgcggaaaatcgccgaagctgacgtaagtgtcggccaggtagtactgcgcgcgcgggtcgcccgcttcggccagcggtttgtactggctgccgggttccatggcgcctgcggcgacgcttgccatcaccagcagtaaatagaggtatttcattttttattatcggtagaggacatagcgagcagtataaaggcaggtgaaggagaagaaaacgacgggaacgagtgggggatactcatggtttatccgaataatcgtgccgtctgtttccccgggggcggcgctgacgcgccttgcccgggctacggattgtgtagccaggacaggtgcgaagcaccgcctccggggaggcggcctgattagcccatcgcgctttcgcgcaggcgggttttcagcttattgtactcgtcaatcacgtactgctcggcggcccgctggtcggcaatcggctcaacgttgacggcgcagtacttatactccggcgttttggttatcgggctcaggttctcggaaaccagctcgttacaggcgccaatccaccactggtaggtcatatagaccgcccctttatttggacgatcgctgacctgcgcgcgggtgataatacggcccttacgcgagttcacccacaccagcgcctcatcctcaatgcccagacgttcggcatcggcggtattgatctgcgcatagcccggttcatccgccagcgcggccagcgccgcacagttgccggtcatcgaacggcacgagtagtggccgacttcgcgcaccgtcgacagcaccatcgggtattcgtcggtgagtttgtcaatcggcgcgacccagtcgcaggtgaagaactgcgccagaccgttcggggtatcgaacttctctttaaacagataagaggtcccctggtcggcgtcggactcatcgcggcacggccacatgacgtagcccagctcgcccattttctcgtaggtggcgccgtagaaatccgggcacagatgacgcaactcgtcccagatttcctgagtgttgttgtagtgcatcttgtagcccatccgggtggcgatttcgctgatgatctgccagtcggttttcaggtcccacttcggctctaccgctttaaagaagcgctggaagccgcggtccgctgcggtataaacgccttcgtgctcgccccacgaggtggagggcaggataacgtcggccgctgaggcggttttggtcatgaaaatatcctggacgataaccagttccagatcgtcgaaagccttacgcacggcggacagctcggcgtcggtctggagcggatcttcccccatgatgtacgccgcccgcacttcgccatgcgccgcgcggtgcggcagctcgctgatgcggtagccggtgtgcgccggcaggctgtcgacgccccaggctttggcgaacttctcgcggttttccgggaacttaacgtactgatagcccggataggtatccggcagcgcgcccatgtcgcaggcgccctgaacgttgttctggccgcgcaccgggttgacgccgacgctcggcttgccgaggttgccggtgaggatcgccaggctggtcagcgaacgtacggtctccacgccctggtagaactgggtgacgcccatgccccacaggatggcggcggatttcgcgctggcgtacatgcgggcgcaggcgcggatctcctgggcactcacgccggtaatctcttccaccgactccggcgtatagccttcgacgattttgcgatactcttcgaagccttcggaacggctggcgacgaaggatttatcgtagagatcctcttcgatgatcacgtgcccgatagcgttgagcagcgcgatattcgagccgttcttcagcgcaatgtgcatatcggcgatgcgcgcggtttcgattttacgcggatcgcagacgatgattttcgccccattgcgtttggcgttaatcacgtgattcgccacaatagggtgtgaatctgccgggttatacccgaagataaacacgagatcggtgttgtcgatctcggtgatggcattactcatagcgccgttaccgaccgattggtgcagacctgcaaccgatgggccgtgtcagacgcgagcgcagcagtcgacgttattggtaccaataacggcgcgcgcgaatttttgcatcacatagttggtttcgttacccgtcccgcgggacgaaccggtagtctgaatcgcgtccgggccatacttctctttaatggcgctgaggcgagtggcgacgtaatcgagcgcctcatcccaggagacggattccagcttgccgccgcgctggcgacggatcatcggggttttcaggcgcggggtaaggatctgggtatcgttaatgaagtcccagccataatagcctttcagacacagggttccctggttggttttcccctgtgccgcctccgcccgaacgattttgccgttatcgaccaccaggttgattttgcaacctgatgcgcaatacgggcaaaccgtgacgacttttttcatcggtcttgctccagttaatcaattggcgcatacgcgctatcgcgccgtcactatgcatcttctatgccatgttttcactgtgggtattgactgatgatacgtcgtttttttgggcgaaatgctgacgaaaaacaggctatcgtcagttttgacgtgtcgacgcgggcgcctgtgacgcggccgggtagcccggccaggcgcgcagcaccgccgccgagggggcgggaagaggcaggtccgggcttatgggcgttacctcggctagcttaaataccggcttctcgccagcgccgccgcgccctgagcgccgttaaacgcggaagaggaggcggcgataaagcgtacggcctgatacggcagcggacggcggacgtaggttttgaccatggcgatgacggcttcacgcgggaaggcgggcatatccattactccgccgccgaggatcaccgcatcggggtcgaacaggttgatgctggtggcgatggcgcgtgcggcgtggtttagcagctgctgcacaaacggctcccgcgcggcgtgaacgaacagctcgcccagttcataggcgcgcggctgctgttcataccagcgctttagcgcaatcccggagcagacggtttccagacaggcggggttgccgcaggcgcagatgagggcgtcatccccttgcggaatatgtcccagctcgcccgccacgccgtgggcgccggtccacggtccgccgttcagccagaccgcgaagcccataccggtgccaagataggccgccagcacctcctgctcctgcaggccgttctgctgcacatcaaaagagagctgcagattcacatcgcgggaaaactccaccgggcagcccagcgccgcttccagccggtcggccagattatacaggtcggcggcggccagcggcagattgggcgttgagataatcgtccgcttgtcttttgccaccagcgccggaaaccccatcaccagcccgcagcagtgggcgtcgtgctgggtcagctgctgctgcagcaggtttttaataccgttgaccaggccgtcggcgctaatcacgtcggcggtgcgccgcttttcgcagtgcagcgcttcgccctgcgccgtttgcaggcaaagccggatatgggtcgcgcccatatctacgcccgcgacgacgttacgctgtttttgcatgaggcagtacctcgcgttttgccgtcaggatctgctctgccatgatctgccacgcgtcttctatcttatcggcgtgattgaagaggcctgaggtgccgacgataaagacgtccgcgcccgccgccatcagtttttgataggtggctttattgcaggagccgtcgatctcgatctcgtagctcagcccctcgcgctcgcgccaggctttcagttcggcgattttttccagcatctccgggataaacggctgcccggcgaagccaggatcgacggtcatcaccgtgattttgtcggctttatgaatgtagtacttcatggtctcaaccggggtttccgggttaaggatcagtccgaccttcatgccttggcgacggatctcttcgatcaggcggaaggcctggccattaatcgtttccggatgcagggtgataaaatccgcccccgcctgcgccagctggctaatgtagtcctgcgggcgggtgaccatcagatggcagtccagcggtttgctggccagctttttgacctggctgacgaaaaacggcgacagggtcaggtttggtacaaaatgaccgtccataatgtcgatgtgaaaatagtctgcgtgctggtcgataaactcgatctgttctttaaatttcagcagatccatacacattaaagagggagcaattttcatgataaattccttacttactgataagacggtcgagggcgacagccgcgatgattaatccgcccattaccaccagctggtagtaggtttgtacttgcaggatgttcagtccgttgttgatagtgccgataatcaggccgccgatgaccaccgagaagatgcgtcctttaccgccgaagaagctggtgccgccaatgatggcgctggcgatggcgtaggtttcaaagcccatgccggccagcggttccgccgccccgaggcgggcggtggagaccacgcccgccagcccggcgcaaacgccggaaatgatgaacaccagcagcatgtggaacttgacgtcgatgccggagtagaaagcggagtgcttgttaccgcccagcgcgtagatgttgcggcccacgcgcatacgggtggtcaggaaccacaggatcaccgccacaatcagcgagaagatcaccggaaccggaatacccagcggcgtggcggcgaaaaagttaacgaaatcaaacgaaaacccgtacaccgagttggcatcagagatcaccagcgtaataccgcggaagatggcgttggtgccgagggtaataatgaacggatgcaggccggtccagttgaccaggcagccgttgatggcccccagcgcgccgccgaccagcacgccgccaatcagcgccgcgaagaacgggtcgacgcccgccagcatcagcttcgcggtgaccatcccggagagcgcgaggatcgccccgaccgacaggtcgatcccggcgacgaggatcgcgaagaactcgcccatgccgatcaggacggtgaccgaactctggacgaagatctgcgtaatattgttggtcgtcaggaagtactctgacgacagggtgccgaagatggcgacgatgatggcgagaataaaaaaggtgccgtatttatcccagaacagcgcgaagttaaacggttttttctcgcccatctcgcctttcactcttgtggtagtgcccatgccataatctcctcttcgctcatgtcgtcgcgattggtcaggatttgcgtcagtcgcccttcgcagaacacggcaatgcggtcgcagacggcgataatttcaggtagttcggatgacaccatcaggatgacttttccgtcatcggccagctggcgcatcactttataaatttcggcttttgcgcccacgtcgataccgcgcgtcggctcgtcaaaaatgatcacttcggggctgcagcacagccatttggaaatcagcaccttctgctggttgccgccggagagctcggtgatgttttgatcgaccgaatggcacttcagcgccagcagcttgcgctgctcctccgccgttctgcgttcgtcgccttcgcggaacagccccatggcccctttgtagccgccgcgcttcaggctctggctgaccgccatattctgggcgatggaaaaattggggaaaaagccgttttcccggcggctttcggtgatataccccatgcctttctttaaggcgtcgagcggcgagcggggcgagatcgccttgccgttgaggtatatttcaccgctgctacgcttatcgactccaaacaggcagtccatcagctcggtgcgcccggagccgaccagcccggcaaaaccgagaatttcgccgcgattcacgctaaatgagatatcgcgtacctttttcttgtcatggctggtgacgtttttcacttcgaacaccgtctcgcgggcgatgttgccggtgctctctttcatggcgttgaagcggttttgcagctcgcggccgaccatcaggcgtacgatgtcgtcgttattcacttcgctgaccttcccgctgcagacgctgctgccgtctttcatcaccgtgtagcggtcgcagatgcggcgtatttccgccagcttgtgcgagatataaacaatggcggtgccctctttacgcagctggttcatgatcaggaacagatagtccacctctttattggtcagcgaggaggtcggttcatccatgatcagcactttagcgtcgagcatcagcgtcttggcgatctccagcatctgcttgtggctgatggagagattcgccaccttttcgtctaaatcgatcttcagcccgacgcgcagcagcatcatcgccgcccgtacgcgcatttccttccagtcgataacgttgacgccgcagacttttttcgtcagatggcggccaatatataaattctccagcaccgttaattcatcaatgacgctgagctcctggtaaataataccaatgccgagctgggccgctaatttatggtcaagcttgtggtagttcacgttattaatcgtaatggtgcctttggtcggttcatgtattcccgacaatactttcatcagcgttgatttaccggcaccgttttcccctagtaacgcatgtatttcatgggggtaaatagttaaatcaaccgattttaatgcgtgaaccgggccaaaggatttgccgatccccgccattgaaatatatggcgtgagcatagaaaatttcctttattaccgctgcgtgatttcccctcttccaaagaaagaggggatgcacagacctatttcgtcaccagaatggaatccaccagcgtaaactgcggggctttatccagcgggatgactttgccgctcttctcggcgtcgaccatcagcttaagacccgtagcgccaatatccgccgggttctgcgcgatagtggcggtcatttgcccggcttcgaccattttgcgcgcttccggaataccgtcggtacccaccaccagcacattgccggttttgccggcgttcgcgacggcctgggcgacgcccattgccatggtgtcgttggcgcagtaaatcgctttaacgttcgggttacgctgcagcacgttcgtggcgacgtccagcgctttgatgcggtcccagtcggcaggctggctggccaccagcttgatctggctcgcttttttgaaggcgtcggtggcgccgctgcggcgagcttcgccggaggcgttaccggctttgccttcgataatagcgacttcgccgccttcagcacccagtttgtcgatgataaattccgcgcctttcgcccccaccgccacgttatcggtggtgacgaaagcctcgacgttgccgccggctttcttcaggttatccatatcgattttttcatcgaggttgaccagaaagatgccctttttccacgctttggctaccggcatgaccaggtttaccgaggagagcggcgcaaaggcgatacctttgtagtttttgttgctcaggtcttcaaacagctgcagctgcgactgaaaatccccttcggaaggcgaggcaaaaatatcgacgcttacgcccagcgttttggcttcgtcctcaataccctttttcatatccacccaaaatggattggataaggtttttaataccacagcataatcggcggcggcaaaggcgctggtggataacattacgcccatgagcgtgccgctgaaaagtttcagatatttattcatggcagtattctcagtgtaggatacagttatattgatcccaccagtgtgggatcggttttttatttaagcgcgccgggtgaaaagaaattaacaatcgcgccagttttttgcatatttaaattcgcttgctcaatgttgagctgtgcaacggaaacaaaaaacgcatctaataatgtgagttgtaatatacgcgctgaggcgttacgccctaataaaggcgtctctggtgctggcgaacaaataataaaatcagctaacttggcaatcggcgaatggtagctatgggtgatacagataattttcgccccgttctttttcgccagctccaccgctgatttgatatcgctggtgcgcccggagtgcgagaccaccagcacgacatcgccttccttcagcagcgaggcggacatcatcatgatatgcgcgtccgggtaggcctggcagcgcacgccgatgcgtaaaaacttatgctgcacgtcggcgcagatggcgttggagccgcccgcgccgtacaggtcgcgctggttggcctgggcaaaaaagcgcgccgcgcggtgaatttcgtcaacgttcacgatcgactggccttccataatggtgcgcagggtgatgttgaacaccttattcaccacatcctgcggcgcatcatcaaaggagagttcggtcggtaacacctgttcagactgcgaaaagtaggcctccagcgcgctgcgcaggttacgaaaaccgctaaaccccagcagcttagaaaccttaacgatcatggcttctgataccgacagcgcttccgcgacgtccttgattgccggcgcatcgctgagattgccgggggtaagcaaccattcgacgatacggctctcgttttcggtcatcccttcctgcttcatgcgaagccagggggcaaggccgatgccgttagggagcgaactggattctgtctgactcatcgctttctcattgtccataaaatgaagacgacactatatcaccacaggcgaaacaaaaaagataccaccaacttcacaaaattatattttttataaagttatgcttatcgtgaagttttgttaatgttgattttatctttatttcttataaattcattataaatcagtgtgttattgttttatttcagttctttttttgcaaggtgaaaatcaggttaaatatcgctttcgtcttgatttgtaaaatttgtccgtgtagaaaggagcctgacgatgctgttttcagcgttttctggggcatttttaggcgtttaaatcacaacgccagtcatccttgtaaagttaacaacaggcgaggctaagtatgaaaaggattgcatttggctgcgatcacgtcgggataatcctgaaagacgatattcttgcgcatctgcgccagcgcggcattgacgtcgtagataaaggcgcatggtccacggaacgtaccgactatccgcgctatgccagcgccgtcgctcaggccgttgccgccggcgaggtcgacggcgggatcctgatctgcggcaccggcgtcggcatctctatcgccgccaataagcacccgggtattcgtgcggtggtgtgcagcgagccctactcggcgcagctttcacgacagcataacgacaccaatattctggcctttggcgcgcgggtgatcggccttgaactggcgaaaatgatcgtcgatgcctggctgactgccgaatttgagggcggacgacatcaggggcgagtggacgccatcggcgcgattgaacagcagcggatttgagattcctccgctactcccggcgatagcccttgattaacgtagagccagccccccgatgagactggctttatgaaacgttactctaccgctttgcttatctgcaccttgtccctcgccggccagctggcgcacgccgatatgattgatgacgcgatcggcaatattcagcaggccattaatgatgcttatcatccgggcgatagccggtctgacgatgatgatgggcgctatcaggacagccgccagcagagcgccgatcgccagcggcagtatgacgaccggcggcggcagcttgaggatcgccgacgcgaacttgacgagcgccagcgccagcttgatcgggaccgccgtcagttggaaagcgaccagcgcaggctggatgatgattattgatacggcacgacccgcggctttcgccgcgcccgcttaatccagcgctatctccatgccgtcaaatcccgcttcaaatcccgccggtagagcattctccatcatccacgcatcgaagcggtggctgatatgggtgaggatcacccgcgggcagccgatgacctggttaatggcccgcacggtgttcaggtcgcagtggttgcgcggcggctgcgggcgcggctcgtggctacagtcgataatgataagctgcggctggttattcagcaggaacttcagcgttttctccggcagcgcggcggtatcggatagccaggcgacccggctgtgggccgactccagcagatagccaaacgtgagccttgagtggttcagcggcagcggcgtaacgcgcaatccctgaagttcaaatcttacaaagggttcgacggtatggctgaaatccagcaggcccggatgcttaaacagatcatcgcagccctgttcatccggggggccgtataccgcaataggttcgcccacgccccagcgcagcgggaacaggccttgaacgtgatccatatgataatgggtgagcagaaactgctgaaagctgccggcgggccactgcgtcatcagatccggtagcccggcatcgagcagggtcaccgcgttgttgaatttgacgaccgcgctacagggacggcgacgatgcgcttcgtcgacgcgggcgcggcggcaggcggggcagtcgcagccgaaaaccggtaccagctgcgcgccgccggtgccggttaagcggatagtcaggctcatctcttctcctcgcgttcaggcagtctgctgttcgcgccggttgccgtgaatacgaatcagcgaaaccagggcatccaccgactggctaagtcggccatcgttattcagcgtcagacactcgttcggcgtatagcgcgccgcgcgcgccaggcgctgggcgatttccgtctcgttctcccgtccgcgctgctccaggcgctgtcgcagcaccgccggagaaacctgcagacagatgggcagcagtgcgtcggcatagcgcgcctgcgcctgcggcagatgggcgcgtgaaccgttagcgaccacgtcgaacccggcgtgcagccacaggtcaatctcgatgccaatgccatagtaattgttgttagcataccagctaagagcaaacagatgctgttcggcgcgggtaaaaaactcatgttcgctgagggcgatatggttttcacagcccgcgttgtgtggacgggttatgtagcggtgcgccaccagcagctgcggatgctcccgctggcgcagagccgccagcaggctgtctttgccggagccggaggggccgaccagccaaatcagtttccctgtcatcagaagaccctcttgccttgccgccagacgtgatcgatatggatatgctcgccgtgacggcgcgccagcaccaggtccgcccgcttaccttcggcaatcgccccgcggtcgtgcagccccagcgcctgggccgggtttttgctcaccagacgaatggcctgcgcgagggtaaaggcgttgccctcgtcgtcggcgatgcgaaaagcggcatccagcaggctggcgggataatagtcggaggagagaatgtccagcaggccgctggccgccagatggtgggcggcgacgttccccgagtgcgagccgccgcgtacgatattcggcgcgcccatcagaacgttcatcccgtgctggcgcgacgcctgcgctgcggcgatcgtggtgggaaattcggcgatgacgctgccaagctggcgcgattcgagcacatgttcgcaggtggcgtcatcgtggctggccagcgcgatattccgttcgcgacagatggcggcgatgcgctgccggttaggctgagaccaggccgccgccagagccatctgctcctcttcgaatttgtccatctcttcgttggtcaggtgatatttgccctgatagtagtcgcggtatttgctgcggtcggcatactggcgctggccaggggagtgatccatcagggagaccatgctcaccggctcgcggccaaccagcttctcaaacagcggcagggtggtgtgatgcggcagttcgcagcgcagatgcagccgatgttcagcgcggttgaggccgcgcttctgcgtctcttccacggcgttgatcattttttcgagattttccaggcgatcgccgccgtcgcgcacatcgccaatagccacggcatccagcacggtggtgatgccgctggcgaccatcagcgcgtcgtggctgctcatcgccgagtgggcgggccagtccactttcggtcgcggggtgaaaaacttgtccaggttgtcggtatgcagctcgataagccccggcagcagccagccgccctctccatcgatggcctccgccagtcggctctggctttcggcaaaggccgaaattctgccgtcctgcacttccagcgagccgttaatcacctcgtcttcgagaaccagctttacgttattgataatcatgctgaaatccccatcgggtgcagacggtcggcgacctggttgcgcgtggcctcgtcgtgaaaaataccgacgatcgccgcgccgcgggctttggcttcatggatcagttccaccaccgcggcgctatttttgccgtccagcgaggcggtgggttcgtcgagaagcaaaatcgggtagtcgaccgcgaagccgcgggcgatgttaacccgctgctgttcgccgccggaaaaggtcgagggggcgaggtgccacaggcgttcgggtacgttcagccgcgttagcaggcgggcggcttttgcggcgctctcttcgcgcgggatgcccagttcgagcagcggctgcatcaccacgtcgagggcggaaatgcgcgggatcacccgcagaaactggctgacccagccaatggtggttttgcgcacttccagcactttacgcggcgtggcggtgaccaggtccacccattcatcgccgtggcgaatatgaatgtggccgctatcggggagatagttggcgtacagcgaacgcagcagggtcgattttccgctaccggaatggccgtgcagcaccacgcattcaccggcattcacggtcagcgaggcgtcggcgagtaccggcagacggacgccgtgctgctggtgcagaacaaaggttttatggatgttttcaacgcggatggcgttcatttttagcctcatcgtgcctgaatttccccggatcgcggcgtgaacgccttatccgggctacctgatgcattaactcacgaagcgcgaccggggagtcccggaggcggcgcgttgcgcctgtccgggctaccggcttgcagacggcccgggatccgtagccccggtaagcgcagcgccaccggggagtggacattcactcagttctgcaacaccgacgacaccagcagctgggtataggggtgatggggatcgtcgagcacccggtcggttaagccgctttcgactacctggccctgcttcatcaccagcagacggttagccagcaggcgggcgacgccgaggtcgtgggtcacaatcaccaccgccaggttcagctcgacgaccaggccgcgcagcagatcgagcaggcgcgcctgcaccgatacgtccagcccgccggtaggctcatccataaacaccagcctcggctgcgtcaccagattgcgggcgatttgcaggcgctgctgcatcccgccggaaaaggtggtgggcaggtcgtcaatgcgcgaaggcgggatctccacctcctgcagccactgcccggcggtggcgcgaatattgccgtagtgacgggacccggtggccatcaggcgttcgccgatattgccgccggccgagacctggcggcgcaggccgtccatcggatgctgatgcaccacgccccattcggtgcgcagcagacgtcggcgctccgcttcgctcatggcgtatagcgagcgctgttgatacagcacttctccctgctgcggggccaggcgggcggagatcgctttcagcagcgtggtttttccggagccggattcgccgacgatacccagcacctcccccggccacagctcaaacgagacgtcgctgaagcctttgcccggcgcgtagaggtgggtcaggttgttcaccgccagtaacggatgactcattttttctgctcctcgctctgttggcggcaataatcggtatcggagcagacaaacatccgtttgccgctgtcgtcgagcaccacttcatcaagatagctatggcgagatccgcagatggcgcagggttcatcccactcctgaacggtaaacggatgatcgtcgaaatcgaggctctcaaccggggtatacggcggtaccgcgtagatgcgtttttcgcgtccggcgccgaacagctgtagcgcaggcatcatatgcatcttcggattatcgaattttggaatcggcgacggatccatcacgtagcggccgttgaccttcaccgggtaggcgtaggtggtggcgatatggccgaagcgggcaatatcttcgtacagcttcacctgcatcacgccgtactcctccagcgcgtgcatggtgcgggtttcggtttcgcgcggctcgataaagcgcagcggctccgggatcggcacctggaagatcaggatctgatcgtcagtcagcggcgtttccgggatccggtggcgggtctggatcagcgtggcgtcttcggtgcgctcggtggtcgcgacgccggtcacgcgtttgaaaaactgacgaatcgataccgcgttggtggtgtcgtcggcgccctgatcgatcaccttcaggacgtcattttccccgatgatgctggcggtaagctggataccgccggttccccacccgtagggcataggcatctcgcgaccgccgaagggtacctggtagccggggatggccaccgctttcaggatggcgcggcggatcatgcgtttggtttgctcgtcgagataagcaaagttatagccggtcagtgcgttagccacgttgattctcccgttgcaggcgtttaagcagcgccagttcggcctggaaatcgacatagtggggaagtttaaggtgcgaaacgaaaccggcggcctcgacgttatcggcatgggccagcacaaactcttcatcctgggcagggcccgccacctcttcgccgtactccggcgcctggagcgcgcggtcaaccagcgccatcgccatcgctttgcgctcgctcatgccgaacgtcaggccgtagccgcgggtaaagtgcggcggttcatcctgagggtcgacaaagccgttgaccatctcgcattcggtcatcagcagttcgccgatagtgacggtgaagcccagctcttcgggtgcgatctccaccgcgacgtagccgctgcgaatttcaccggcaaacggatggttgcgtccgtagccgcgctgggtggagtaggccagcgccagcaggtagccctcgtcgccgcgcaccagctgctgcaggcgcgaagagcgcgaacagggataaaccggcggatggcgggtgatatcgtcgggctgcgcgtcggtatcccgctccgctttcgccagcccctgctggacgagcagattaaagacgtgcggcgtcgcttcctgcggtgcgctatcggtcgccagcggcggcgtttcgccgttggccagcagggtaaaatcgagcagacggtgggtgtaatcgtaggtcgggccgagcatctggccgccggggatatctttatagaccgccgagatacggcgctcaaggcgcataccggcggtgtcgacaggctcgctgaccgccagcctttgcagggtggtgcgataagcgcgcagcagaaaaatcgcttcgacgctgtcgccgctggcctgcttcagcgccagcgccgccagctcccggtcggcgatgccgccttcggtcatgacccggtccaccgccagattaagctgttggctaatctgatcaacgctgatttcaggaagccgtccctcgcctcggcgtttctgttcctgtagggcgtgagcggcgacgatcgccttctcgccgcctttgacggctacgtacattagcagacctcgacatgggtggtgcgcggaatcgccagcaggcgttcgccgcaggtgaggatcagatcgattcccagcgggaacggatgcggacgctcggtcaattcttcaataatgcattccggcagctgcggggcgatcatccgctcttcggcgatccccgcgccggtcagccgcagcatccggccgccgctcaggctggcaagctgaaccaccagcgtgacgccggtttccggggcgacgacggtaccggcggaaagcacgttcagctgctcggcgctgatgctgtcgctggcgacggcgaaggtcgcctgctgcggctgctcaaccagcggcgcgccggtatgaaagcgcagattctggccgacaagatcgttatgcagcgcgggagcgagccagaccggcgtgtcgtgatccaccagcgtcagcagcaggctggtggaggcgacgttcagcggctgccagccgtgctgaagctgctggagggagacaatcactcccggctcgctcatcgccttcagcaggcggcggaaactgtgctgggcatcctgcacagccagggtaaaggcgggttgtaatgtcatgcgttatctccgcgaaccagagtaaagaagtcgacccggctggcgttgacttcggcgcgccgggcttcaatgcgcgcgctgcgttgttcttccagcggggttatcagggtttccatcagggtgtgaaaatggtgtggcgactgcatcagggcatcaatggccgcgcagcgttcagcgtgcgggcggtcgcggcccagaatccagctatagccgagggtgccgtcggccaggcgaatggcggcgcgggttaaggtggcgtctccggcgaagaatcggtcgccgatgccgcccatacgcgcctgcagctgcaccagcccggtctccggggcgcgaatcagctcatactgcggcgcgagctgcagcgtctgcatccgcgccgccagttcttgtggttcactgtgggccagcacggacatccagcgctggcgggttgcggtatcaaagtgcattcagtgctccatggtgaattcaatcatgtcggcgcgggtcaggctgacggagtactctgtcgcgctctgctcgccctggcgatgattcagggtgcgcacgcacagcagcggcgccatgttgggaatgccgagaatattgctctctttggcctgcgcgcgtcgggcgctgattttggtgcgcacgcgggtcagttcgatatcaagccgatcgcgcagcaggtcatggagagagccgtgggtaaaggtttgtagaaccggccacagcttcaggtcggtaaagtagtggtcgatcagacacagggcgacgccgttcacgcggcgcagggtgcgcaggtgaatgacgttatcgccttcactgatagcaaacgcctcggcaacgtggctgctggccggacgcaccaccgacagcagcttctcgctggttgggtggctgccctgttcgagaagattctggctaaagcgggcctgggcgttgagcggataatctatcgggcgcatcagcaccagcacgccgacgccctgacggcgctggacccagccgcgttcgacgagctgatcgatggcccggcgcagggtgtggcggttaacctcaaagcgggacgccagctgctgctcggcgggcagatagtcgccgcagcggtaatgatggcgaagctcttgctccagtttggcggcaatttcctgatatcgcgttggataactggtcggatgtctggataagtacatgtcaatcgagcctcactaaggacaaggaagtatttccctctgagcgtgggccgatcctgacggttttttgttacatttcggttaacccatgatgaccgggggatgaagagttgatgccggtggaatgacagggtaagggggagtgaatgcacagatgccctcactccgccctctctccctttcggggggagcacagggtgcagcgttaaggctctttcaccacgttgaccatccacgggacgccaaagcggtcgataactttaccgaagccgtgcgcccagaaggtttcctgccaggccatctcaatctgcccgccgtcggcgaggccgtcaaaccagcgtttaccctcaataacatcctgcgagtccagcacgacggtaaatccggcgtagcgctccatgttgctggaggggctgtcgctgagcatcaggatactatcggcaatgcgcaggctggcgtgcgcgataccgtcggcagccagatgctggccggaagggcagccatcttcggcgtcctgcgtattctgcggcatttcaccccaggtgattttgtggatgagctccgcgcccagcgcctgctggtagaaagcgatggcggcagcgcagttgccgctaaaagcgatatagggacttaagggcataaccattacctcaggtaacgaatattccattaagcgtagaaggggattgcagaattaagctaggcggcagcgagggattccgggaggccatgggaaaatatatttccccccgacaacgggcgtcgggggaataaaatcagttctttttaacaaattcggattttagcttcatcgggccaaaaccatctattttacagtcaatattatgatcgccttcaaccaggcggatattcttcactttagtgccgatttttagcatcgaagagctgcctttaaccttcagatcttttaccacggtgacgctgtcgccgtcggcgagtaaattaccgttggcgtctttgaccaccagcgcgtcgttatcgtccgcaggctcggcattgttccattcgtgggcgcattccgggcagataaacatgccgccgtcttcataagtgtattcagaatggcattttgggcagtgtggcagttgcatgacgttcctcgcgattactgggtaaaacaggacgttggtcctttaaatggtggctgatagccgaaagtaatgctgattatagcgcaatcccgcacttttgtcgggccttttttatgacttatcgcagcggagaaagaggatatatatcgtgaggcctggcgggcttattttcataaaaagcgcaggatatttgcggaaatgtatcgctaagttccaatattcattgaacttattgcttttggatgactctgtttaagggtaggtaaatttttgtgaagttgatcccaaatttaaacgctgttagggtaaaaaggcgagaacgcaaattcactacacttattagcggtaccgcttatttcattatggccagagcaggcgtcaacaggttcggttgtacggactgtcagcagacagtgcaggcaaacctgctacgcttgaaatgtggagcacagcaattcgccgctcccaacgcatgacgcgaatgaccttgtcattcggcggagattcgtgcgctcaaggcgagagcaaaagaggataattatgcttaaaaggaaaaagtaaaacccatcacgcttcgggatgtgaccatcattgatgatagcaaactgaagaaagcgattaccgcagcgtcgctgggtaacgcgatggagtggttcgattttggggtatatggttttgttgcatatgcgcttggtaaggtctttttccccgatgccaaccccagcgtgcagatgattgccgcgctcggtactttctcggttcccttcttaattcgtccattaggcggcctgttcttcgggatgctgggcgacaaatacggtcgacaaaagattctggcgataaccatcgttatcatgtcgataagtacattctgtatcggccttattccgtcgtatgccacgattggtatctgggcgccgatcctgttgctgctgtgtaaaatggcgcagggcttctcggtgggcggcgaatataccggtgcctctatctttgttgcagagtactcgcctgaccgtaaacgcggctttatgggcagttggctggacttcggttcgatagccggttttgtcatgggcgcgggcgtagtcgtgctgatttccagcgtggtgggcgaagagaacttcctcgactggggctggcgtattccgttcttcctggcgctgccgttagggattatcggactttatctgcgtcatgcgctggaagagacgccggcgttccagcagcacgttgataaaatggagcagggcgaccgcgagggcctgcaggatgggccgaaagtctctttcaaagagattgcgaccaaacactggcgtagcctgctaacctgtatcggtctggtgatttccaccaacgtgacctactacatgttgctgacctatatgccgagctacctgtcgcataacctgcactattctgaagaccacggggtgctgatcatcatcgccatcatggtcgggatgctgttcgttcagccggttatcggtatgctcagcgaccgttttggccgtcgtccgttcatcctgattggtagcgtggcgctgttcgggctgtcgattccggcctttatcatgattaacagtaacgtccttggcctgattttcgccggtctgctgttgctggcggtggtgctgaactgctttatcggggtgatggcctcgtcgctgccggcgatgttcccgacccacatccgctttagcgccctggccagcgcctttaacatctcggtgctgattgccggtctgacgccgactctggcggcgtggctggtggaaagcacgcagaacctgatgatgccggcttactatctgatggtggtggcgttgattggtctgattaccggcctgtcgatgaaagagaccgccaatcgtccgctgaaaggggcgacgccagcggcttcggatattcaggaagcgaaagaaattctcggcgagcactacgataacatcgaacataaaatcgaagatatcgatcaggaaatcgccgacctgcaggaaaaacgttctcgtctggtgcagcagcatccgcgcatcaacgactaaatcgttttgccagtaattcatgccgccgcgggcttcccccggcggcattttttatgtcctgagcggctacgggcttgaggtcattcgaggaccgcccaggcccggtaaggaccgggcggtgccacaggaagagagcgggctacggcttagctatgggtcagaaagcgcgccagccgctgctgcagaatttgattttcgcggctcaggcgcgcgttctcgtccagcagcgttaaggccacagcaatgcccggccagtccagctccagctctttgcgcaggcgtacggcgcggtgaacgatggtcaccgcgctatcgtcaaacagccagttttcccgctgcggctggcgcggctcgatcatgccgaggccaacaatctcgttaagctcatcttcggaaaggccggtgtggagacaaaactcggtaatcgtgaacgtcactgttatcttagccatcaggctttcccccatgtcttacgcggctcgaagctggattgtgcatccgccagctgctgccagagctcacggctcttctcatctggttttggcggcatgacgatttttatcaccgcatacaggtcgccggtggtggttttgctggtcagccctttgcccttcacccgcagccgctgaccggcctggctgcccggcggaatggtcagcaggatgctctctttcagcgtcgggatagtgaccctggtgcctagcgctgcttcccacggcgccagcggcaggacgatttcaaggttgtgtccgacgatatcaaacagcggatgcggggcgatatgaatcaccagccacaggtcgccgttagggccgccattttcgccgggggtgccctggcctttcaggcggatccgctggccgtcgacgacgcccgcgggaattttcacgttcagggttttcggcgtttcgctttcgaccatgccaaagacgttataaaccggcagcttatagctgatggtgcgcgtctgctcggccagggtctcctcaaggaataccgcgacttctatctctaagtcatgaccgcggacgccgtgctggcggcggctatggtgcgcctgctggccaaacatggaggagaagatgtcgtcgaagtcctgctggctatagctctgctcgtgggaatgctgctgctgacggccaaactgcggatcgttacggtgctgccagagctggtcgtattcggcgcggcgctggtcatctttaagcacttcccaggcttcggcgagatctttgaatttggcttcggcatcgttttctttgctgacatcggggtggtatttacgtgccagacggcgataggcggtcttaatggttttcagatcgtccgttggctgaacccctaaaatggcataataatcctttaattccatggttttatctcatttatgcgcaatattatggttacagatccctggatcaggtgtctttactaagcgtagggcaaatgagggcggatgtgggggaaaaatggcgcaaacttgacgccgtcgggattgacggcggccaagcgtgaacgccagctattcgctggagcgcctgcggtttctgcgcaacccttccagcagcacaagggcggcgccaatggctccgcccatcacggggagcgcggcgggcgcgttggggaacagatgaacgatggtcacatcggtcaccatcatggaaccggctatccagccgatgagcgccccgcccagcatcaccacggacgggaagcggttgaggatagccagcaccagcttgctgccgaggacgataatcggaatgctgatcaatacgcccagcgcgaccagcagcagatggccttttcctgcggcggccaccgccagcacgttatccagcgacattatgacatcggcaacggtaatggtgaccgcggtacgccacaggctgctggagctgctgacatcattctcttcttcctgattggtcaccagcttgatgccaatccacagtagcatcagcgcgccgactactttaagccacggcaatgagagtaaatagatcgcgatagctaaaagcagcacgcgcgccgctattgcgccgacggtaccgatgataatcgctttggtacgctgctgaggcggcagtttacggcaggccatcgcgatcaccaccgcgttgtcgccacccaataacagatcgatagcaataatttgcagcagaataaccgccacgtcccactgactgaaaaacgcattcatacccaactcatcgaaccaaaaaagagaacctacggaaaaacgcaggggcgaagcgtactctcgttagggcaccctggccaccttacagagagaccgcgcgcagcgagtgattgaaaaatatcgttaccaatcattgcatggtccggcaatgattcgcaggcaaaggatgatattttgttcgtagaaatacatctgccgttcacctatcgcaaggactaactacatgcccggccataagaatttactcacatttgcctttatcggcgctaccctgtttccgcttatggcgaccgctgctgatgcgccgacttttacgcctgaacaagaggcccgtattggcaaaatcgccgcggattacttagtcgcgcatccggaagtgctgctgcaggccagccagaagctacagcaaattcagcaacagcagcaggccagcgccgcgacccaggcggtactgaagaatgcggccgcgctgacccaggataaaaatacgccaacctacggcccgaaagagggcaaagtcacggtcattgaattctttgattatcagtgcgtttactgcagtcgtctggcgccggtaatggagcaggtgattaaagagaatccgcagacccgctttgcctttaaagagtggccgatctttggcagccgttgggaaacctcgcttgaagcggccaaaatcggcctgcagatttatcagcagaagggcgcagaggcttatctgacctaccataacgggatctattccaccggacataacgaaggcaagctgacggctgccgacatccagcagcaggcgaagaaagtgaatttcgacgcgaagaaagcggcggacgttgagccggtactggaaagcaccaatcagctggcgcaggaaattggcctgagcgggacgccgggcgttatcgtgatgccgactaccggcgccacggaagcgacgatcaccgtattcccggggctggcggataaagcctcgctggatgcggcgatcaagaaagcgggcggctgataatcaacgcgtccgccggacggcgggcgcgatttagcgatgacagcagcgctgcagcatcgacataatgacctgaaagagctcatctttagcctgctgctccgtgatgacgccgttcactaccgcggccgatagcccgtcggcggagccgagcatggcgagaatggccgcctcgctgagattctcactctcgcaaagcggcgaaaaatagtcccgacattttccggtaaaggtggcgatgcactcttgtttgatcttctccagctctggcgtcccggccagcgcggccatgacgctgggcatctcgcgcccctgaagcagcacgcactcgatataggcgttggcgatcgccgaggccagcttctccgcattcggttcggtattgcgcagtatctcatccattcgcgccgtctggcgttgatcgtattcgcgataaagcatcgcgaaaagccctgaacggctgtcgaagtgatcgtaaaccacgggtttcgtcacgcccgcctgcgtcgccagataacccaacgtcagagcatcggtcccttcttgccgaataatatgccaggcgacatcaatcagctgcttgcgccgctcttctcgcgttaaacgctgacgtacgagtggttcagacatggaaacattctcccgttgacatattaatataccaacagtaacttactgatggtaagttactgttggtatataaggctacgtccaatatcgttatagcgcaactggggtatccgtcatgcatgcattaatcgtggtttctcatcctctcaagacgtcgctgactcacagcgtagcgacggcgattgcgcaaggaattgccgaatccggcccgcagcatacggctgacatagcggatttaacgcaggaaggctttaacccggtatttgccgagccggatatcgccgcatttctgcaaaccggcggcacgccgcccgacgtgatggccgagcaggccagaattgataacgccgacgcgctggtgctggtttttcccgtttactggtggtcgatgcctgggctgttaaagggctgggttgaccgcgtgttttcaaacggctgggcctatgaggagaccgccgacggcgatgtcgtgaagaagctgggccgcctgcgggtgcatctggtggcattaggcgcagcgagtcaacaaacgtatgacaagcacgggtttaccgatgcttttcatgcgcagattgtccacgggatttttgattactgcggggcgacggtagccagttcgcagatgctgctgttgcctgacctgaaaacggcggaggcgcatctggaggcggggcgccagctgggaagaaagatgtttgtctgaaacagaaaagcaaaaacacgccttttgggcgggttctttaaatagtggtgcccggactcggactaacgccgcaggcgttgaacagcgcgcttgccgcgctggccccgaaggggtgagccgctgtgcggcgaataatcgaacggagttcgatggagagtccggccgcagaaaagcaaaaacccagccataggctgggttctctgaatagtggtgcccggactcggactaacgctgcaggcgttgaacagcgcgcttgtcgcgctggccccgaaggggtgagccgctgtgcggcgaataatcgaacggagttcgatggagagtccggccgcagaaaagcaaaaacccagccataggctgggttctctgaataagtggtgcccggactcggaatcgaaccaaggacacggggattttcaatcccctgctctaccgactgagctatccgggcaacggggcgcattaaaccgtaatccgtacgcggcgtcaatcaaatttctcgatttatctactggttgcttaagtttacggcaattctgcacctgaagacgcttttttgctgaaaattacatcataccgttgtcgccttcacggattttccagccgctggtcaccgagatagcgcggcgtaatccggagatcgcgtagtcgccaacaatgtcttcgtcatcgcgcggcgagctgatcgtgatttccgcatcgacgccgtgacgataggcgccgtggtggctaaagatggtgccgataaaacatttatcgttcagccagaccgggatatatgccacggtttcatagatatagttcgacgctactccgctatagtagttttccgcgtcgtcggatgatgtgcccggaggaatagggcaaattggcgcgtcattgtcgctctgtggcttatccttgagcaggctgctctgcatcacttccagcgacttcagcaggtctgacttctcccgctcattcagcgcaggcgtcagaggctggtctttttccggcgagcgaatgtcgttaagggtgtagcgatagcggattgtcactgccggcgtactgcctgaggggccaaacgggcgcaacagatagagattgtcttcgccaaactggccgttgtaccagagtgcgtaaacctggccgttaatgcgcacccagtgactccactggttggcgccgcggccgttgagagaatagagcgcgcccggaacgcctgcgtcaaaatcatcgccattgccgctatcatcgctgttaaccgcagcaaaagcgtcgtcgctgcgttttagtatcccggtatagctaaagagtccggtgccgccaacgtagctgtcgataattaaatcgcgtttaccgtctccgtcgaggtcgaccagcgtaaagctcactttaccgttttcggagtcggcgctgatatcggactggagaaacgcctgccactcatcatcgctgatatcggcggacggtttcgtcgtcgataccagagagtcgtccgcgtaggtcagcgtaaaatggctgacgttcccgctgagggggaactgctcggcgatattattcagatccagttcaggattggccttctgctcctttaatacggcgttatacagcgctttcagcgcgttgttatcggcatctttctgctgcttcgggataacctggctcacaaaggtgggcagcatccacgcgccgccgggggcgatctcccggcaatcgccggtggtgtatttcaggctctggacaaacgttttgccatcccagacgcgctcttcaccgctgatgcagtcggcgatgccgcggcctttattgaaaaaggtgagcacgccgtcggcatagctggaggcgtcggtggtgaccagctgaggctgggtcataaacgccttgtcgaccacccacgttgcatagccgtcgttgtaggcagcgcgccagcacagcgcctgaatcagcgtgtggcttttatccaacggcgttgcggtgatctggcgctcagatgccgggatatccgcgttttgccagtcgtcgcaatggctgtttagcagagggacgagctggggacggagtttctgccgctgcttcgccgtcagcgctacggtggcggcattgtggatgaccggcgcggcgataatttccggcgcgggcgcggctgacaaaatattctcatcaccggcgtcgccctggcgtaacagcgcatcggcagtgcccaggcgctgctgaaactcatccattttcaggaatacggcgctgctgcccgcgtcggagagcgttttacgctcgccgttaagggcaagctcaattttgccgttgtgctccagggcctgaatcagggccgccgtttgggtgtcgtcaaagcgaaagtggctctcgtcggcggcctcaagtggaccgttatcccgatcgtcaatgaacagatttaccgttgcgtcaggggggatatcgcgttcggtttgcgcgaaagtcgccacagcgatgacgtgctgcgccgcgcccgcattgcgggtcagcagaacgctgacttcgcccatggtggcgccatagccggcggctcggcaggtcccggtgttgtcgcaggcgagctcccagtctttgtgcgcgaaagaaaagccttgcggagaagctgccaggagcggtgtcgaacacagccccatgatggcaacccaaagaagagagcgcatatcaaaccctgtcagcatatcgatgaggaggggattatatgcgcgatgaattggttaagatatcggaatcaggtcagggcgccgcccatacggcactgggcaaaacgcaaaatgtcttctgccaggcgacgcgcggtatcgacatccgtctggctgcgcttgatcagcagtcggctcaggcagccttcaacgatcagctccatctgctttgcgaccattgccggatcgtcaacttcgagcttgctaagcagttcatgggtataggccagcgaagcctgcttttgctgctcggccagctgatggatcggatgctgagggtccggataaaaagtacaggcggcaataaacaggcagccgggataacgatggttgcttacgcaggtggtcagcgcggcgtagcgggccagcagtttctgctccgcgctgagcgactcgtccagtaaaagctggcggcgccaggcatcgacctgatggctgagatagcgaagcgcgtcgtacagcagcgcttcctggtcaggccagaaacgtttgaggtcattgagcgggtaagccacgcgctcggcgaccatttccagcgtggtgttagcgataccctcgatttcgaggatttggatggcttcacccaagacatcttcacgttgcacggtcttttcctccattattcctcctacagtgtcgctcacggttgtcgatcgcgcaaatgggcgctgaatgccgcggcatccataaagccggtgacgcgctgcgcgggctgctcctcgccctgttcattgaaaaacagaatggtgggcaagccgagcacctggaggtgcttcagcagcgccgcgtcccgcgcgctatttttggtgacatcaacctgcagcagaacggtctctttcagggcctgttgaacctcaggtgaggtaaaggtgtatttctcgaactctttgcaggccacgcaccagtcggcgtacaggtcgagcatcactggtttgcctttcgcctgcgccagcgcctgattgagctcatcgacgctatggatacgggtaaactggagatgggactgccgctgcgcgaccggcgcatcgaaagcccagtcctgcagcggacgggcgctgaccagcgcggcgccgagcatcactatttgcacgatacgcagccaggggcgcgtgccgcccagcgaggtaataaacgcccaactaaaaaaggcgacgccaagcagcgaccaaagccgcaggccccacgattcgcccacgatacgctcgagtaaaaataccggcagcgccaggatcacaaagccaaaggcggttttgacgtgggccatccacgggccgcttttcggcagcagacggttaccgaatacggtcaccaggatcagcggcagccccataccgagcgcgtagaggtacagggtaccgccgcccagccacagattaccgctctgggcgatatagagcagaatggcgctcagcggcgcggtggtgcagggcgagcagattaatccggcaatcgcccccatggcgaatacgccgccgggtgaaccgccctggcgtttattgctcatcagcgtcaggcgcgtttgcagcgacgaaggcagctggagcgtaaacagaccaaacatcgacagcgccagcaggataaacagcaccgacaggccgatcagcacataagggtgctgcagcgccgcctggaactgcaggcccgcagcggcaacgaccagccccagggcggtgtaggtcagggccataccctggacgtagataaaggccagcagcagcgcgcgggcggtggagaggcgtttttgaccgcccagcacgatgccggaaatcagcggatacatcggcagaacgcagggggtaaacgcgatgccgataccaatcaagagcgcccacagcgcgctaaaggggagagcggcatctttattgtccacagcggggggcggaaggtcagacggcgactctaccggcagcgccgggcgcgtttccagcggcagaggcggggtcagcccgggttgcccgacggcggcatcgctgctggagcgcgcgagcgcgttgccgagcggcacgattttggtttccggcggatagcagaaaccggcatccgcgcatccctgataagtcacggtaagagtcgcgccggcggcggcgtgagtcagagtgaccggcacggtcaggcgctggcggtaaatttcgcttttaccgtaaaactcgtcctcatgccattcgcctgcaggcagcgaggggtcggtaaacgccgcatcggcggacgtcagctttatctgtttacggtaaagatagtaaccatccttgatttgccaggtcagattaagatcgtgttgattctgctgaaaatcgaaggcaaaagcctggtcagcaggaacaaagttcgagcggccaggggcgtcgaacaggccggcaatggccgatgtgctgcaaagcagcaggatcagcgtaatgatgcgttgagccatgagaggtaatcgttgtctccgtgaataacgggcagaaccagaagttcaggggtttgatacgggtgatgggacttcaggcagtccagcagcgcctgctgatgggcaaggtcggttttcagcagcatttgcacttcatactcctgctccagttttccttcccagtagtagagcgatgtcgctcccggcaggagagtggcgcaggcggcgagtttttccgccagcgctttggccgccaggtcctgggcggtcgcttcatccggcgcggtacagagtacaacaacagcatcaggcatcgtcatcgtgaacctcgtatcagcgaaaagaggcactatagcatgcaagatagggaggattaacgaaacgggccaggatctggcccgaatttgaagagatttacagcatgatgccgccgaaaataaacccgaggatcacgcatagcgtaatggcgatgacgccggggatcaggaaggcatggttaaagacatatttgccgatacgggtggagccggtgtcatccatttcgaccgccgccagcagggtggggtaggtcggcagaacgaaaagggcggagacggcggcaaatgaggcgatggcggtaagcgggctcacgcccagcatcagcgcggcgggcatcagcgccttagtggtcgcggcctgggaatatagcagggtcgcggcgaagaacagcaccaccgccagcagccacgggtagttgtgcagcaggtcgcccgctacggtctggatatcgctgatgtgggctttcacgaaagtatcccccagccatgcgacgccgagaacgcagacgcaggcgctcatgccggatttaaaggtgctggcgttgagcacttcaccggtgtcgattttgcaggtgatgcttatcagcgtcgcgatagtcagcataaacaccacaatcgcttcgttacgcggcaggaccggatcctggatcagccctacggtatcgctgatggcggtggcgtagaacatcaccgcgacgataccgatcagaaacagtaataccgagcgtctggcgtgcggcttcagttcaaaaacctggctgccgcgcagtttgacttccccttttgccagccgctcctgataaatcgggtcgtctttcagctcacagccgaggaagttacagacgatggcggtaagcatgacggcaatcagggtaaccggaatacagatcgccagtagcgtcaggtagctgacgcccaggggctcgagaataccggcaaagaagaccaccgcggcggaaatcggcgaggcggtaatggcaatctgcgaagcgaccaccgcaatggagagcgggcgtgaggggcggatgccctgttcttttgccacttcggtgataaccggtaaggttgagaacgccgtatgtccggttccggcaagcacggtcataaaccaggtgaccagcggcgcgagaaaggtgatgtatttgggatgacgccggagcatacgttcggcaaggctgaccaggtaatccatccctccggcgacctgcatggcggcgatagcggcgataaccgccataatgatttcgatgacgtcgaaggggatcgcgccaggtttaatttgaaacacgagggtcaggacgaggacgcccaggccaccggcgaaaccgatgccgattcccccgagcctggcccccagataaatcgccagcaggacaataacgagttctgcaccaaacatatttgccttccttgttttattaacaagttgatattgggttgttgtaatttagtaaatcaataagaacaaaaagggcatgtcattgctgacatgcccgtggttagtttaatcggaaaacctactgttcgctttcatcggtataacgcttcgctttgtaggccggatgcatcaggttttgcgcagagaagatatcgtccagctccgccgcggtcagcaggccgcgttcaagcaccacatcccgcacgcttttgcccgtttcagcgcagattttgccgacgatatcgccattgtggtggccgatatacgggttgaggtaggtgacgatgccaatggagttgtagacgtagctttcacataccgctttgttggcggtgatgccgctgacgcatttttccagcaggttgtagcaggcgttggtcagaatatggatagattcaaacatcgcctggccaatcaccggttccatcacgttcagctgcagctggcccgcttcggaagccatggtgacggtggtgtcgttaccgattactttgaagcatacctggttgaccacttccgggaccaccgggttaaccttggcgggcatgatggaagagcccgcctgcagttcaggcaggttgatttcgttcaggccagcgcgcgggccggaagagagcaggcgcaggtcgttacagattttggacagttttaccgccagacgcttcagagagctgtggaccatcacgtaggcgccgcagtcggaggtcgcttcgatcagatcttccgcggggacaaccggcaggttgctgacttccgccagtttttgtaccgccagctgctgatagccatccggggtgttcagacgggtgccgatagcggtcgcgccaaggttcacttccagcagcagttccgcggtgcgcagaatgcatttggtctcttcgttaagcagaacattaaacgcgtggaactcctgaccgagggtcatcggtaccgcatcctgtagctgagtccggcccattttcagaatgtcctggaactccacggccttctgctggaaaccttcgcccagctgattaatcgcatcgatcagtttgaggatagaggcgtagaccgcgatgcggaaaccggttgggtaggcatcgttggtggactggcatttgttaacgtggtcgttcgggttgagatactgatattcgcctttctggtggcccatcagttcaaggccgatgttcgccagtacttcgttggtgttcatgttaacggaagtgcccgcaccgccctggaacacatcgaccgggaactggtccatgcatttaccgttattcaggacctcatcgcaggcggcgataatggcattggcgacgcttttggggatagtttgcagctctttgttagcctgcgcagcggccttcttcaccatcaccattccgcggacaaattcagggatatcgctgattttgttgttgctgatgtagaagttttcaatcgctctcagagtatggacgccgtagtaagcgtcagctggaacttccctggtacccaacaggtcttcttcgatacgaatgttgtttaacatgtgaaccttctctttcaagctgcctatgaattcaccaaatacgcagaatttatgggatctagcgcattttctggccgcagattatttccttaatcggcccggtgcccacgatcatatgctgatgatagcgaatatcagccgccctgatcacttattatgtagtgaatcttataagaattattaatctgtgaaatgagtcaccggttttctaattttgaaaaaaataagctttttttacgattgaaaagtgacgttttggcccaacatcttgctgatgcgaatagcacatctatgactacgggcgccgatgctggcgtctgttaatgaaggagacgccggtgcgttggattccgttaattgccgtttttttatacgtttacattgaaatctcgatctttatccaggtcgctcatgtgcttggcgttctgctgacgctgattctggtgatcttcagctcggtggtggggatatcgctggtgaaaaaccagggctttaaaaacctcatgctgatgcagcagaagatggcagcgggggagagcccggccgcagagatgatcaaaagcgtgtcgctgattatcgccggtttgctgttgcttctgccggggttctttaccgatttcctggggctgctgctgctgttacctccggtacagaagcatctgaccttaaaactgatgccgcatctgcgctttagccgaatgccgggcggcgggtttagcgccggaacgggcggcggcgatacctttgaaggcgaataccagcgtaaagacgacgaacgcgaccgtctcgatcataaagacgatcgccgcgactaacatgcattgcccgggccggttactccggcctggaatacccctccgccagcctgcgcttcggtaaaaacagccacagtaccgccagcatgataaacgcgtaaaggctcttccagcccaccatcgccagcagcagcaggcaaagcaggctgccaaacgccgctaacgcgcgataacgtccctcaagcaaacggcagcccgccagcatgcacagcagatagatcataataaaaatgccgttggcgtagacgatcagcgcatcaagattgatattgagcgcataaatgcataacgcgctaatgacgcagcagccgagcaccgcgttcagcgcgttgcgcggaatctgtcgcggcgacagccgggccagatagctctcgggcttgtactgcgcctgcgaccagaccaggcgagcaaaactctgaatatagatattgaggctggcgaagcaggcgagatagccgataacgcaggcaatccacagcgcctgcacgccaaacaggcgcaccacgatattgggcagcgacgcggcggcggccatctcctcgccaaaggcatgaaaatgcaggaccagcacggtacaggcccagtagacggaacccgccagtaataagccaatcatcagcgcgcgggggaaatcgcgttccggctgcttaaactcagaggccaggtgtgcaaaagcctccagcccgacaaagcaccagaacatcactgaaagcgcggagaaaagctgcgaactatcgatttcagcgggcgccgggaaggggatctgcgcgggattgatcgcgccgcgccaccagatggcgacgatcagggcgacaatcagcacggcaaccagcgtttgtagattggcgctggagctggctccgcgggaaccgacccaccagataatcgccagcgttcccagctcggccagcagcaactggctgtcgtgccagccaaaaagcgcctgaccaaagccggtggcgatgtgcagggccgcgggtaatcccaccgggatcaccgataaaaagagccagccggtgacgcgcgccagacgcgggccaaaggccatattcacaaaatgcgccacgccgccggcgctgggaaagtggcgacccagcgtcgcaaagacgatagcgatgggaaacaccagtaaaatcagcgccggccaggcccagaggctgttatcgccggcgaccagcgcggccagtgccggaacggcgaagaccccggttcccagtaatgacgtggagagtaatcccacgccttgagccagccctaactcctgttttaaaccactcatgattcaaccttgcgcccggcaaaaaaaggatggtatcacaatcgcttttgcttatgacgtcgggcgaggacggcaaatttatgtgcgtccgagcacgaggacaaatttttttttacttttccccttgaagcggtaaaaccccatccccatctctcagggcactagccggaaaaccgtgtgcggaccggcgtcatccataactgataatgactttctcaaaggagagctatcaaaatgagtattcgtccgttacatgatcgtgtgatcgtcaaacgtaaagaagttgaaacgaagtctgctggcggcatcgttctgaccggttctgcggcagcaaaatcaactcgtggcgaaatcatcgctgtcggtaagggccgcatcctggaaaacggaaccgtgcagcctctggacgttaaagttggtgacatcgtcattttcaacgatggctatggcgtgaagtccgagaagatcgacaatgaagaagtgttgattatgtccgaaagcgacattctggcaattgttgaagcgtaatccgcgaacgacactgaacatacgaatttaagggaaagataaaatggcagctaaagacgtaaaattcggtaacgacgctcgtgtgaaaatgctgcgcggcgtaaacgtactggcagacgcagttaaagtaaccctgggcccgaaaggccgtaatgtggttctggacaaatccttcggtgcgccgaccatcactaaagacggcgtttccgtagcgcgtgaaatcgagctggaagacaagtttgaaaacatgggcgcgcagatggtgaaagaagttgcctctaaagcgaacgacgctgcaggcgacggtaccaccaccgcaaccgtactggctcaggcgatcatcgctgaaggcctgaaagccgttgctgcgggtatgaacccgatggacctgaaacgtggtatcgacaaagctgtcgttgccgccgttgaagaactgaaagcgctgtccgtaccgtgctctgactctaaagccattgctcaggtaggtaccatctccgctaactccgacgaaaccgtaggtaaactgatcgcggaagcgatggacaaagtcggtaaagaaggcgtgatcaccgttgaggacggtaccggtctggaagacgaactggacgtggttgaaggtatgcagtttgaccgcggctacctgtccccgtacttcatcaacaagccggaaaccggtgctgttgagctggaaagcccgttcatcctgctggccgacaaaaaaatctccaacatccgcgaaatgctgccggttctggaagccgtagcgaaagctggcaaaccgctggttatcatcgctgaagacgttgaaggcgaagcgctggcgaccctggtggtgaacaccatgcgcggcatcgttaaagtggctgcggttaaagctccgggcttcggcgaccgtcgtaaagctatgctgcaggacatcgcaactctgaccggcggtaccgttatctctgaagagatcggtatggagctggaaaaagcgactctggaagacctgggtcaggcgaaacgcgttgttatcaacaaagacaccaccaccatcatcgatggcgtgggtgaagaagctgcgattcagggccgcgttactcagatccgtaagcagatcgaagaagcgacttctgactacgaccgtgaaaaactgcaggagcgcgttgcgaaactggcaggcggcgttgcggtaatcaaagttggcgcagcgaccgaagttgaaatgaaagagaagaaagcacgcgttgacgatgccctgcacgcgacccgtgctgcggttgaagaaggcgtggttgccggtggtggcgtagcgctggttcgcgttgccgctaaactggctggcctgaccgctcagaacgaagatcagaacgtcggtatcaaagttgcgctgcgcgcaatggaagctccgctgcgtcagatcgtatccaacgccggtgaagagccgtctgttgttgcgaacaacgtgaaaggcggggaaggtaactacggttataacgccgcaactgaagaatacggcaacatgatcgacttcggtatcctggacccaaccaaagtgacgcgttctgctctgcagtacgcagcatccgttgctggtctgatgatcaccaccgagtgcatggttactgacctgccgaaaagcgacgcgcctgacttaggtgctgctggcggtatgggtggcatgggcggtatgggcggcatgatgtaatcgtgcgctataccccttagaaataaagaaccctcgggcagaaatgctcgggggtttttctttttgtcgtctttttagtataaggttgtacatccgggccagtgcgtccagctcattgatcgtggggaataacatgcaggtaaaatatttagcagggattgtcggcgcagcattgttgttagcaggttgcagctccagcaacgaattgacctctggtggccagaacgtacgctttgttgaggataaaccgggttctgaatgccagctgttaggcaccgcgaccggtacgcagagcaactggctgtccgggcagaatggtgatgaaggcggctctatgcgcggtgcggcaaacgctctgcgtaaccatgcggcagaaatgggaggcaacgtgatttacggcgtcagcagcccgacgcagaatctgttgtccagctttgtcccgaccgatagccaaatgaacggccaggtttataagtgcccgaattgatttaacaggtgcctctcttgagccaatagaggcacctggcatattttttagcgcgcgttgattttcgcctgtgtcgccaggtagaacgcatgtaaaggccgcaggcactcctccagcgtcatcattctccccggctgagaaggaagaatttggctaaaaatctggctgggctggcgctgcgcatgcatttctttcagctttgggcttctctcaattaagcgcatcacaacgctattctcctgctctgacggatgggcggcgttggttttaatcaccgcgccggagatgatttttcggccttcctccgtgtcacagcagtacagtacgcccagataatgggaaaacagattgagtttccactcatcctgaagatactgctgataatcaatgttactggtattcgttaaatccagtgcatatagcatcaggctttccagtgatgacgttaaatttttaatcagttcgttatcaccggcgtttttaagagattgctgaataccaatcagcagcgcttcaacctgcatatcatcaatgcgcagcgtagcaatttgctcgttttgcagcaccagaatgagcgttgaccaggtcgctcctggttttaacgtaattgatatgactcgcctttccggattgggctgctggacttccggcatacctataaccggggtgttttctatgagctgctcattaaaagcaatcagttcattcttataactttcaccttcagcgtttaagcgctgtaatacgatagccatcctgtgttgtaaaactaacaggaggtcggtaagcgcctgggcctgaagatagtaagactggcaaagttggttactcagctttactttgagcattaatgctaaaaatttgtcttcatatttaattgatgcggtattaaaaccaataaacgtgccttgcattcggatctccttttcctgagggttacgctggtgccagcgtgcgtagctgtgataaatcaatgatgcgatcggctgaggcaatggtggatggccgatgggcgacgatgattcgggtaatgcttagcccagagatagactggttaatcaccgactcatttttaagatcgagatgactggtggcttcatccataaacagaatgctgggttttcggtagagggcgcgagcgattaagagccgctgtttttgtccgccagagatgcctaaaccgagctcgccgacaatggtttcgtatcccatcggcattttcatgatttcatcatggatattacatctgcgtgcgcattcaacgataaagtccatatcggcgttatcttcaaagccgctgatattatcgatcagggaacccgagaagagtctgtcttcctgcagaacgcaggccgttccatgacggaagttgttaaggccgattttctgaatatcgaggttatccgctatcacatcgccgctggtcggggacagcaggccacacatgactttcagtagcgtggttttaccgacgccggaagggccgaccagcgcgatggattcgcccggttcaacggtaatatttaaattagaaaaaataggctgtgaaaacggatcgtactggtagctgagattcttcacttccagtttaacgcccgtgttttctgcaaaaacgcgtcgtgaaggcagttctttttccggttcgctaaagacgatctctgaaagacgctcattatgtaacgacagcatacgcagctgcataatcagatcgatcaaacttgaggcgcgctgtgagaactgaccgcgataggcattaaaggccataaacatgccaagggtcatattgttatcaataaccataattgcccctagccagagaaccgcaacctggtcgatagaagtaataaaggtattaataccgccaaacatcatatcgaaccgagtctgtttgataccggcattacaggcgtcgatgttgatatttaaccagtgctgagaacggcgttctttcaagttcaatgccttaatcgttgaaataccatagagcgattccataaagtgcgagctggaacgggcgcccttgataacctgctcttcggcaacgcggcggtagaagctgtaggtcgcaaaacgcatgatgacgtagcataaagtaaagcccaccacgacccaaaccagccagccgccgtaaagcgttagcataatcagcaggccaacggtcataatcgaatcgataatgccggtaacaatgctattggtgaaggttgagcggatagtatccagcgaagagaaacgagactgaatatcgcccagatggcgcttctcaaaaaaggataacggcaggctcgtcagatgatcgaacagcgttgtcttccactgaatattggtcagcgtatttaacgttaatgagatccaggcccgcagcatactaataaatgtacggaagagcgtgaagaagaccagaccaatacagataaccgaaagcaggctctgatcgtgcgccatgatgacgtggtcggtgaccagctgcgtgccgatgggtaataacagaccgatagcttcaaccaccactgaaaaggcaaagatcttgagcaggacggatttcagcccaacaatattacgcatcaggtccagcaggcgtagacgagatttcgcctgttcctgctgaaaattttggtccggccatagctccagcgcaacgccggtaaagttattggacatttcctggatgccaataacccgtttacccagcgccgggtcgtgaacaataaagctgcttttacgcactttagtgagtaccacgtaatggttcataccccagtggatgacgcagggcagctttagctgcttgatttcatccaggtcgagggatagcgcgcggcttttcaacccggcatgttccgccgttttgctcaacgacatgagcgtaacgccctgcgaagggctgccgtagcgatgacggaaattgaacaggtcgatattgagcccgtagaagccgcaaaccatcgccagacaggcgataccgcattcggcagcctccgactgtaatatcaccggcgttttgtggcggaatgaaaaatttagcttgtcggtaatcgtcttaaaaagttctttattcatcgatcgggccactcacgctttgcgtcatcttatagaaaggggtaaacatccacatatacagcgggcgttcttcaagaaaaactaccgcctgagccttcaggccgttagagagcgtgagcgtttttccattgtagctaaaagtcttgtctttaatttttataatggctttatagagcgccagctcctgctggctagtgccgttattaacgttggtatattcagccatctcctggcgtgatgctggaaccgaggagatagaaatcacctttcctggaaattgtccaaatttatccgcaggaaaagcatcatagcgaatattaatcgtgtcgcctggcttcacataagggatagtattattgggtaaccataggatgagataatactcaatatcccctgtgggttttatctgtgcgaggctgctgccgttctcaaccatctgccccttagtcacggccagcgactcaatctttccattagttgtggctttaataatgagattaccgttcgcgttagattcaaccagctggtttttgtaatcattgatttgattgtgctggctggagatctgattatcaaagtctgctgctttggttattttatcgctattggtttgcgtgagctgagattccagctgcatcttttgggtaaccagagattgataggcgctttgctgttgaaaatataaagaatgctgatagttatactggtctttggttatcagaccatccttgaggtatttatcatagctggataagttggtaaacattttatttaagccaacctgagtcgtcgccagcatgcggttagtttctgccaatgaggcgctggtggttttaatctgtttctcaagcgcagttaatgtttcagatttattgcgcatcagtttgcttatgatatcttccgcattagcgattttttcattaattacttcaatttgggccgcgctcacattcccattgatggtattacgcgaaacgtcaagctcataaagcggttgacctttattaacgatatcacctacttttacgtgctgattaaccacaaaaccttgctgtggggcgaagacgttaacggagtgggggagcgtaatgacctcgccacgcacatcaatgcgttgagtaaaggtacaaaatatgagagataatacaagggcgataagaaaaagtgatgctaacaaggtgaccaaccacgccggaatacctgctaacaataatgctttccctttccagtgaatttttttgtactcaatcgcttccttgcgatagatattttttaacattgttatcagctttgagatagagaagtgagataaaagaaggctcgttagagccttcataaagttatggtctgaaaattttcttaccagtaggctagcgtaccatcaacaaatccatcaaacatctcgatgcatttatcgagagtgatatcccagccaaccatggcaccagcaatagcgccaccaacgccgccaacgcacagaccgtaaatcatccccaccgcctggccaattgacccgatacctaaaataccgccaccattgccgccaaagataccgcccatagcagaaccggcaagtgcgccagcagtggcgcctaaaatggatgccccaatagcttctgcgccattacaaataatgctacttaaggcattagcaacagacgagaaatcccaggagtagccgccagaaatctcttccatttcaaatacagttaattgtttcattatatattccttttatatatgggtgcttttttgaatacaacaagtcaaatcaaaagtaatttgacactttttaaatgaaaaccacgaatgcgcaaagtgatatttcgatgctgattctagtatgtgtttattatttttcaatgttcgctttgatgattgattaatgaatttttagtgattcatgtaacaacctttgtgaattaatatctatgatgtgattatgtgtgagtaaaaaacctgacaaagagaagtgttttgctcgccatacttgaagttgtttatgcatcggctgtgttcgctcatcccataaacttcatccagtaaacttctgggagcccactcgcaactaaaatcatttttgataattgagtttttatcgcaccaatagttctgtgctaaaccgaccgggatgaatttatatccttgttaaggagaagactattcctcctggagaatgacctctaaatctgtttttatctcaccggtgattcctgcagaaacatttttagcgattttaaaatagtcagcagtgagagttaagtcttgactcttagtactgacgaagggataagcgtccagatcgttaaattttatcgcagaaccattttttttaagaatgatacctatgttttgagcaccgtctggtaatgagtttaatagtagcccatttacgctcgttgatgctacagatatggggctaaaccagtaaatatattttttgttagtttccgaatctgggcacttaatatcgagggtaatgtttttagccttgcctgcggcgctgccgacggctactgagtttaaatctgaaatgtcaatggtggatagttttacgatactcccatttcgcggcgagatttcacaggtagtttccttaaaagtaatgttagtcaaatccacattgattctgaataattcagcggtattcgatgcacctgtgttggtctgatttggcgggccagccataaaataaaccgccgttttgtttcccttttgtttcgttatggggccggttttcactaaccagaccatgacctggccagacgctttagaaaaataatgattgctggctatttctggctgatctatttctgcaggggaaaaatagttaactgatggtaaggtaatatcagaaatctgaaacccaataccggggatgcccgtctcataaactatttttccaccaattttagtaatattagatgggcttacgacaggtacggctctgacgacataaacatcgctggaactacacgatgaaaatgttttgggatttacacttccacgtcttgccgacgctaatatgctaccgttaggtaatgtggaatccgcgatgacagaaccgttaaaactaacggtaatcgcaccgccacccgttttactatatgagcaggtagccaccgcctgtaagcttatgctgagtaaactaataataaaaaaaagacatttcatagtattactttccctgttggtggcaaaccgcagtcgtctgcgcgatgccttcgatttccgtagccagactataagccgctttacactgctgaccggcctttgacccccactgggcatagacttcaccgttatctttcagaccggacatatagaccataccgccatcagatacgatgctggcctgggcatttttatcggtagttgatgttaccgttgcgccatacggcacgttttctcctgacgctctcttaaggataagaaatgcgcgacggccaatattgcccgcgaagttagcccgtacaacggccgcacgggtgggcaccactttttgcgtcgtatttggcaactccatattattacccagagtcgtgctatctaaggttacgttggtccgatggtatggcgtaacgtacggaataatcgcgtagccgcgggagtccgtttcgatagtcgcgtcgttttccaggcgtacatttttcagcccgggcgctttaaccaatacggcggtctcagacatttcctgacctaaggtaataccgtcggcatgaactaatacgccaccgctcagaccatagttaattaactggctatttttggcataactgtagccggcgttaactgaacccgcggaaccacgatagttgccgtagatgccgccgctggcatcttccctattgctgtagccctgctggacgttccagtcgaggttatgattttctagcgcaaccccgctcagggaaacatactgatcggtggagcccggactgctgttggtggcgttgtaggtcgcataagcattgggcaaccactcgcttaaaggaatagagatattaaatgaaacgacatggtcatcctctacataacggccggagccattatttccccagctgtagcggctatagctatagcccgcataatagttgaagcgacggaacccgccattataaccaatatttagcgagttattgtggcgcttgctgtcccagtagtcctcaaatataccggatacagaaaggctacctaaccccgcccccaggctttggctcacggtaatattggttctgttacgcagagagcgcggagtatagccgccgtatctgttgctataggtgttcatcacatcgcttagcgtattgtacccggaggtcgaatagcgatagccagctacggtaatattggtgccggtctcaagaatatttttaccatagcggatacgccaggattggccggatgttttatcttcatctttcttgctggaccaggctgtcgtgacgtctgcggaaactgcgccaatatcgccaaggttttgcccggctccgaaagcgagcgcctgatagttggatgccgcctgcaaaccggtatagaaagtggtgttgcttaagacaccgtagctgatcgtagcctgcgtaaacggcttttcatctatatttccgtcatatgggcgatatttaccgctcgtaatttcatactccatctggccttctctgagcattaatggcagagaggcgtaaggcacgacgaagttctgtcgggaaccatctgactcctcgacggtgacgtaaagatcgccgttaccgccggtcgagtagagatcggtgatttcgaaagcgcctggggcgacaaaggcctggtagatttgatagccattctgtttaatgacgatgcgagcgttggtcctggcaataccccgaacaattggtgcgaaaccgcgcaggctttcaggaatcatatccgtatcggttgccagttgaatacccgtgaaggggacgctgtcaaaaatgctggagagagaggtgctttcacccatgactaaggtgctttttaacggaacaatgcttcgctgcacatagagatagacggaatcccaatcactcttcgtaccggctgatttattccaggtactaaggttgcgcaggcgccacggcccaacgttcaggccggattgtaaattaagattgtaatattcattgtcagcttcgtagtctttacctgaactaaactgatagttggtcagcaaggcgttaataccgtcatcaaactcatcgggagaaacaaaaccctgagcgattgtcgacagggctgcctgcggtatggagatcagcaactgttgagtattaaagttaaaatcggtagtcaaatccgggatgacgctcgtatcagcacagccgtttgcatcctctcttaatgttggaaatgcttctgaacgtaaaccataggttgttaatttagcaatgcttaaacaaggggccaatttttgcgcacctgtcaccggatcttttttgtcaacaaagcggatatcagctgtttcttgcagactattatttaaaataacgtcaatccgatacacccctggcgcctgcgcatccctggttgagtagagggataaatccggtattgaggatggatcgccctgatttactgacttaataaaagcgggatcaaaaaaatcacgtgcgagggtattagtgcttaaaccgagagcgagcgccggaacgagaacgaaaaatgtgtggtaggttgcagatagtgcccctcccattttttttattgaaatagacatacttttcaccctggccaatgaagaagaatttatatcgatgaggtattggctggccctgaacccccgttatccgtagcaaccttccactcgatctctgaaccatttatatctgcaggcaaagtaaactctttgctggcaaaagcatcaatattattaactgaactggtaatatccctgccgtttattattattgatttaaaataaatgaagaacggcgtcggattttttagcgttattttattaccggatttacgccactgcagttttttagcttcagtagtaatattcagatcctgaatagctcgagggcgatagatgagacgcattctgtggcgaacggcgagctgcagcttgtttttgtcggcttcactttcgctggtcggtgggatagacataacgttaaagaagtaaacggtttcacgatcctgcggcgctttggatatatacgcattagggaaaatacgcaccgtattcgtttgctttccctccagacggaaaagcggaggcgtcaccataaaaaagctatcttttatcccttcagatgcttcaacccaggatttaatgagatagggcgtatcatctttgttttcaatgtttgcgctgatttctcgcgcgccttctttataaagatggcgggttgaatcaaccacgactccggcctgagccacaaagcagatggtaaaaaaagaaagtgtagtcagcctcaataatgacttcagcataattcattccctgaataaaataatggggtttacctgaggtaaaccccggtatgcttattagtagctaatagtaaaggttgctacacccttaactgcaccatcggtaacgccgtttgcggttttaatatatgccgctttataacgcagataagaaggagtccctgcagtataagcaataaccttaggcgtagtaccggtgaagcttacgcgggttccatcagtgttaaccacggtaacagcagcgttagtcgccggactggcagcggtgttggtcagtacgtcatccaggccgctgatgtagtcgcctgttacggttacgttgatattaccggaatatttagtcgcgcctttctggcagtcttcgattttatactcaatgtcttttgctgtagacatatacggcgtgttgactgccattgcctccagcacggatgctttgacatcgtccagagttaaagaaccgcctgaaatcatcgcggacggcgttacgttacaggattcgccggtgtcagtaacgttacccagaatagtcagagaagagctgttccctgccgcgaaagcctgaacgctcaaagctgcagaagcagcgaccattacagctacaattgtttttttcatttatttaatccatttatatatactaaagtcctgaatagtgccagagcgtggatattaattagtatgatatataataactaacattccgctatgtattcctgaacactatcgttattttcctcctgccgacgctattatacaaatctgatatacatagcgcatattgtgccggagcggtaccaaatctaagtgcaggatagataaaatgcatgtgaattctgtttgaatttaaaggttagttgttgaagcttgcaaattcacaagcagatttcgtagataataatgagcgtagctggaacgtatagttgtaaatcagccttccctttggttcaaatatcatgataatattatccccgctctgggaggagcggggatttatccttggaattatctaatctggcaggctaaaagggatgttctgtgtttgctaaaggtgaaattgaatttaattcatctttgtttcatatggaatggtgagagaggattgggattatgatattcaatgaatatatcattaataatgaagttatttttaatgtaaatatgaatgagctgcagcctgtaggagacaatggggatagtgtgaccctcaacgcaccaacggcacgctgcctgcagcttttactcgaaagcaacgggaagattatatccagagaagaatttctggatatagtatggaaaaatagaggaattgtcgtttctcagaatacgttttatcaaaacatttccttgctaagaaagtcgttagtgaaagcaggattgtcgcaagatattattgttacagtaaggcagcggggatttgttctcgccgcaggatcaaatatcgcgtcattcttccgtacggacgaaaaagagccagaaaaccctgaaaatgtgcagatcaccgcgagcacatcttcgcctccggttgagaacaatgtgattcaccatttagccattcaggacgatgcgcaaaaaagtttcagtgacaataacgcaaccgagttcaaattacctaagtggattttacctctgctattggtgatgaccgcagcaaacattctttctcttttcttgtaactttaatgagtgggtttacagcttgcttttatatttgcttttactttcttccggaaaggataacgactggttttacgaaaatgattaagccgcagtatttatatcccagtgagtaatagtaaataagcagtctgcctggcttcgcccggcagacggattgactattgctgctttaaccccaggtcgaggggcgtcttgctgggttccccgccgatttcccgcgctagtttgggtactaaatagccggacaccagcgtcaacaattcgcgcacgatcgctctggcttcttcgtcactgaccataaaatgcgccgcaccctgcactttgtctaacacgtgcagataataaggcatgacgccggcgtcgaatagcgcgttgctcaggtcggcaagtgtgttggcgttatcatttacgccgcgcagcagcacgctttgattcaataaggtcacgccagccatacgcagttttttcatggaggcacgaaacgccgcatcaatctcgttggcgtggttaacgtggttcaccagcagtacccgtaacgatgatgcagcaatacgggcaaccagcgtatcagtaatacgcgcaggaatcacaatgggcagccggctgtgaatacgcaggcgcttgatgtgcggaatagattccagctgcgtcaatagccagtcgagttcatgatccttggccataagcggatcgccaccggaaaaaatgatctcatccagctggggatgtgccgaaatatactccagggcctgctgccagttacgcttattgccctggttttcagcataggggaagtgacgacggaagcaataacgacaatttaccgcgcagccgcctttcaccagcagtagcgcacggttgctgtatttatgcagcagaccgggcacaacgctatgctgctcttccagcggatcggtagagaatcccggggcattaataaactcttcctgggaggtaagtacctgacgaagaagaggatcgttgggattacctggctccatacgggcaataaacgcccgcggaacacgcagtgcgaacaggcgtttagcatcacgccctgccaatagattcgcatcagcgtctacatttaaaagatgcagcagttcatcaggactggtcacaacatcggcaagttgcgttaaccaatcttctctggatggggtatttagggttacaatatgcgccattttgtggcttagctaccaattaacaaaatttcagagggccttatggcgacttactatagcaacgattttcgtgccggtcttaaaatcatgatggacggcgaaccttatgccgttgaagccagtgaattcgttaaacccggcaaaggccaggctttcgcgcgcgttaagctgcgccgcctgttgaccggtactcgcgttgagaaaaccttcaagtctaccgattctgctgaaggtgcggacgttgtcgatatgaacctgacttacctgtataacgacggtgagttctggcactttatgaacaactctactttcgaacagctggccgctgacgctaaagccgttggcgataacgctaaatggctgctggatcaggctgaatgcatcgtgaccctgtggaacggtcagccaatttccgtcaccccgccaaactttgttgagctggaaatcgttgaaaccgatccaggcctgaaaggcgataccgcgggtaccggcggcaagcctgcaacgctgtccactggcgcagtggttaaagttcctctgttcgtacagattggcgaagtcatcaaagtcgatactcgctctggcgaatacgtctcccgcgtgaagtaattcaggcggcgaaagagttggcgcagcgcgatgctgcgccgctacaggttgaaaccgcaggcaaggaaaatgaatcccacactgaaacttttgctactgttattgctgaacggttcgctgctgactggatgcaatacggctcgcggcatgggcgaggatatccagagcctgggtcatgctatttctcacgcggtcagctaatcttatttcatcaggcaattcttattcatatactcacgctctatctgattccctttcttcacttctttttctcttaaaaatcgtctcgcttccctcatcctggaccagtttgtctatgcttatagagcacgataactaaaactggttaataaggatgacattatggtaaaaaaagcgattgcagcgttctttacggttttggcactttcctctgtactgaccgcatgtaacaccacgcgcggtgtaggtcaggatatttcagaaggcggcagcgcgatttcgggcgccgcgaccaaagctcagcaatagaccatggcggtacggccgttggtcgtaccgttcttcctcaccgttgccacgtcgtgtataattcctgtggaatatcatctaccttacgggacggcctgtaagcgtttcacatctggggacggccccatcaaaggagccatatgtcctggtttattctgtttatcgcgggtctgctggaagtcgtctgggctgtcggcctgaaatatacccatgggtttagccgcctggtgccaagcgtgataacgattgccgccatggtcatcagcatggcgctgttgtcgtgggcgatgaaaacgctacccgtggggacggcttacgccgtctggaccggaattggcgcggtcggcgcagccgtgacggggattatcctgctaggcgaatccgccagcccgatgcgcattgccagcctggcgtgtattgtgattggtatcattggcctgaaaatgagcgcgcattaatactgctgattgacccacagcagtttactaacgtcgaatccctgccgggtagcgatatccagcatctgctgcttcacttctggcgggattttcggcgcgcgcgccagtagccagagataatcccgatcaggtccgcaaaccagcgcgtagcgataatccttgtccagcgcaatcacgttatagccgccatagaaggggccgaaaaatgacactttcagcgcggctcgcgtgggctccccggtaaagtaagctacgccgtcggttttctgccacatcccccggtcggggttgtatcccttattgaccacgtccagcccaccatcgtcgcgcaggctataggttgcggtaactttttctaaaccgctctcaaaagggtgatcgaagcgggcaatctcataccaggtgccaagatagcgttgagggttgaacggactgaccacggttacgccaggaggtggcgtcggcgcgctgcaggctacaagcagaaatgaagcggcaacaaccgcaataacgggtagcagacgcataatgttttccttgccagttttaagctaagtgtagattcaggcaggaaaaatgcggcagaattttcttgagaagcgagcccggtaacataatgctaccgggcttatcgccgaggaggtaaaagcggcctccggcgagcgctttagatgaacaatatgccgaccagagtgacgacggtcagaatcgccgcaaggccgtagaagacccacttaccgttgggtacgtgaattttcaaatcatgcatcgcatggtgaatacggtgaagtccacaccatagcggcagcacaatcatcaggaaaatgaatgcgcggccaataaagctatgggcgaaagccagcacgcgttcgtagctgaaggcgtccgcgggcgccagtccgagcggcagcataatacccaccagcagcacgatgacgggggcgacaatcgctccccacatgccgccagcgccaaacagcccccagaataccggttcatcagaacgttttggtttgggattaatcattccagcctccttaccagaacagcgcgacaaacaggatcaccacggtgacgaccgcagtgacgacccaaagccccttaataaccggctctggccccattttctcgcctttaaggataatattggcagctttcggtgccagctcaaaccaggttttggtatgcagcagcgcggctgcaagcgtgatcaggttcaggatcacgacaatcggattttgcagaaaaccgatatacccggcccagctctccgcgccgtgcttcagtgcgaacaatccgtaaatcagcacgatgctgaaccagaccgtgggtaccgctgttccctcacgcagcatatagaagcgataaaacggcagctttttccaccaggtggacggcatcggccgcacgtagggtttgcgtttagtcgtcatactgcactccttagcgtggtttcagggtggcgataagaaagtctttcgagctttctaccttgccctgctggatcgcggccgccgggtcgacgtgtttcgggcagacttcggagcagtagcccacgaaagtacatgtccagacgccattctggccgttaagctgcgccatacgttcctttttaccgtggtcgcggctgtcttcgttatagcgatgggcgagggtgatcgccgccgggccgataaactccggattaagaccaaactgcgggcaggccgcgtagcacaggccgcagttgatgcagccggagaactgatggtatttcgccatctgcgccggcgtttgcttgtttggtccttgatcgggcgtgcgcgggttgccaataatgtacggcttaatcgcttccaggctttcaataaagtgggtcatatcgaccaccagatcgcgctcaatcgggaagttagccagcgcctcgactttaatgcctttggtgtattcgcgcaggaaggttttacaggccagctttggcaccttgttcaccatcatgccgcaggaaccgcaaatcgccatacggcaggaccagcggtagctgaggtccggcgcgagattgtctttgatatagcccagcgcatcaagcagcgaggtttgctcatcatagggaacttcatagaaagcgctgtgcggtgcgatgtccacttccgggttgtagcgcaccacttcgactttcatgtttttcatctcagccattcgtcgtctccttcttctcggctgcttccgcttccgcaccgtacacgcgttttgccggcggcagagtggtgattttcacatcactgtactccagcctggtgtgaccatcggcatcgcggaaggcgagggtatgcttgaggaagttgacgtcgtcgcgctcggtgcagccttcatccaggcgctgatgcgcgccgcgggactctttacgcgcgagggcggaatgcgccatacattcggcgacgttcaggccatggcccagctcgatggtgtacagcaggtcggtattgaacacgctggacgtgtcggtgatccgcacgcgcttgaagcgctcctgcagctcggcgagcttatcgaccgttttctgcatgagctccggcgtacggtagatgccgcagccttcttccatcgacagacccatgtcgtcgcgaatcttcgcccagttctcgttaccttcctgattaaccaggtctttcaggcgcttctcgatatcgacgacctgcgcgtccagcgcggcgctattggcttcgcccgcttcggttgcgcgctgcatggcctgctcaccggccagacgaccaaagaccaccagctccgccagggagttggagccaaggcggttggcgccgtgcagacccacagaagaacattcgccaacggcaaacagccctttgatacgggtttcacactgctggtcggtttcaatcccgcccatggtgtagtgtgcggttggacgcaccggaatcggctcttttaccggatcgacgccaacgtaggctttcgagagttcacagataaacggcagacgttcaagcagctttttctcacccaaatggcgcagatcgagatagaccacatcgcctcgcggcgtagggatcgtgttgcccttgcgccattcgtgccagaaagcctgggagactttatcgcgcggacccagctccatatatttatttttcggttcgcccagcggtgtttccggacccatgccgtaatcctgcaggtagcggtagccgttcttgttgaccagaataccgccttcgccgcggcagccttccgtcatcagaataccggagcccggcaggccggtggggtggtactgcacgaactccatatcgcgcagcggtacgccgtggctgagcgccatacccatcccgtcgccggtgacgataccgccgttggtattgtagcgatacacgcgtccagcgccgccggtagccagaactaccgcgttggcgcggatctgcaccagcgtaccttccatcatattcatcgcgaccagaccgcgagcctgcccatcatcgaccagaatatccagaacaaaatgttcgtcgaagcgttggatttgcgggaattgaagcgaggtctggaacagggtgtgcagcatatgaaagccggttttatcggcagcgaaccaggttcgttcgatcttcatgccgccgaatcgccggacgttgacgctgccgtccgggcggcggctccacgggcatccccactgttcgagctgggtcatttccgtcgggcagtgatgaacgaagtagtcaacgacgtcctgctcacatagccagtcgccgccggcaacggtgtcgtgaaaatggtactcgaagctatcatgatcctgcgcgacggcagcggaacccccttcagcagcaacggtatggctgcgcataggatagacttttgaaattagagcgatttttgcatttggattagcttgcgcggcggctattgcggcgcgaagacctgctccgcctgcgcctattacggcaagatcggcttgaaaagtttgcacgacattcctccagtttttgtttatttcgccgccgggctggcgaaaacgtatcactgctcctttataggtaaggagtatagccgtagggttatgagggaaaattgacgtgttcgatttttttatcgttctgtgcggtcctttatctcattgctttatgtttttgggttatcaataaattaagtgtatgtaacgcgtttacgtattcgcacaaaatttgtttcatccgccagttacgagtagacttcgtgcccttgtttcaaatcggagaacgtaccatgagcgaaacggcaacctggcagccgagcgcatccattccaaatctattaaaacgtgcagcggtgatggcggaaattcgccgtttctttaccgaccgcggcgtgctggaggtggagacgccctgcatgagtcaggcgacggtgacggatattcatatggtcccgtttgagacgcgtttcgtcggtcctggtcattctcagggactgaatctgtacctgatgaccagcccggagtatcatatgaagcgcctgctggcggccggctgcggcccggtctttcagctgtgtcgtagcttccgcaatgaagagatggggcgccaccataacccggaattcaccatgctggagtggtatcgtccgtgctatgacatgtaccggctgatcaatgaagtggacgatctgctccagcaggtcctcgactgccagccagccgaaagcctctcctatcagcaagccttccagcgtcatctggaaatcgatccgctgtcggcggataaaacgcagctgcgcgaagcggcggcgaagctggatctgagcaatattgccgatacggaagaggaccgggatacgctgcttcagctactttttaccatgggcgtcgagccgcacatcggtaaagatcgtccgacgtttatttatcacttcccggcaagtcaggcgtcgctggcgcaaatcagcaccgaagatcaccgcgtggcggaacgttttgaggtctattacaaaggcattgagctggcgaacggttttcatgagctgaccgacgcgcgcgaacagcggcagcgttttgagcaggataaccgcaagcgtgcggctcgcggccttccgcagcagccaatcgatcataatctgctggccgctctcgaagccgggctgccggattgttccggcgtggcgctgggcgttgaccgcgtcgtgatgctggccctgggggcagaaagcatcggtgaggttctctctttcaccgtcgaccgcgcctgatcctctcttagcttccctttcgatgatggaagggaagctcgccttttagccctaatacccacaataaccatttggttttttgctactatccgcgctcatttttttgggctatccggcatcctctgccgcgataccgcgtttggatagatttatgcaccagcaaataaagaagatgagcctgattgggctgatattaatgatcttcacctcggtatttggttttgcaaacagcccctctgcgttctacctgatgggctacagcgcgatgccgttttatctcttctccgctctgtttttctttatcccgtttgcgctaatgatggcggagatgggggcggcctatcgtaaggaggagggcgggatctattcatggatgaatcatagcgtcggcccgcgctttgcgtttatgggggcctttatgtggttttcatcctatgtggtctggatggtcagcacggcggctaaaatttgggtgccgttttccacattcttattcggcgcggataaaacgcaatcctgggcgctggccggactgacttccacgcaaacggtcggtattcttgccgcgtgctggatgctgctggtgacctttgtcgcggtaaaaggcatgcacaaaatcgccaaaattaccgccgtcggggggatcgcggtcatgggccttaatctggtcctgctgctggtgagcctggtgattttactgctcaacggcggccattttgcccaaccattggatttcacggcctcgcctaatccaggctatcagtccggtctggcgatgctatcgttcgtggtttttgccatctttgcctacggcggaatcgaagcggttggcggtctggtggataaaaccgagcagccggaaaagaattttgccaaaggcattgttatcgcggcggtcgtcatttctgttggctattcgctggcgattgttctgtggggcgtgagcgccaactggcagcaggtattgagcaacccttccacgaacctcggtaatatcacctacgtgctgatgacccgccttggcgccaccctggctaatgcgatgcatctgccgcccgccgtcgccgccctgagcggattatggtttgccagaatcaccggactcgccatgttcctcgcttataccggcgctttctttaccctgagctactcgccgttaaaggcgattattcagggcacgccaaaagcgctctggccttcagcaatgacgcgaattaacgcgaacggtatgccggcgaacgccatgtggtggcagtgcctgctggtgagcgtgtttattctgctggtttcctttgggggcgataccgcgtcggcgttttataacaaactgacgctgatggcgaatgtctctatgacgctgccgtatctgtttttaacgctggcatttcctttttttaaggcgaagcaggatctcgatcgcccctttgtgatttttaaacaccgcggctcgacgctgctggcgaccgccgttgtggtactggtggtggcatttgccaatatctttaccgtgattgagccggtgatggaagcaggtgactggagcagcgcgctgtggatggtcggcggaccggctttcttttcgctgctggcgctggggatctatgagaattaccgccggcgtacggcggtgcagctgatggttcaggagagctaaaacgctggccttgcctgcgttcaggcaaggccgttcttacaggctgccgggcgcgcggctggttttccctgccgaggtcagcgccctgctgctttttctgccatcgatgctctccaggcgcatctggaacggcgggaacggcatatcgataccgtgctcgcggaatccggccagaatcagctggtgcatctcgtggcgcagcggcatccggtgccccatttcggcggcgtagatacgcagctcgaaaatctggatcccctgctgcagatcaacaagaaacgcttccggcgccggggtatcgataaccaacgaacagcggtgcgcggcatttaacaggatctgcgccacctcttcggtatcggcatctaccggagcaggcaccgttagcaccacgcgggtcaccgaatccgacagcgaccagttgatgaactgttcggtgatgaacgccttgttcggtacgataatctctttacggtcccagtcgctgatggtggtggcgcgggtattaatacgcgtcacgctgccggtgagatcgcgaatggtgaccgtatcgccaatgcggatcggtttctcaaacaagataatcaggcccgagataaagttggcgaagatctcctgcaggccaaaaccgagacccacaccgagcgcggcaataagccactgcagcttggaccactcaatgccaatcatcgagaagccgaccagaccgccgatcagcatcagcagatacttagtgatggtggtgatggcgtagccggtgcccggcgtcagttccagatgctggaggatagccagctccagcagcgcgggcaggttgcgcaccagctgggtagtaataatcagcaccaggatggctatcagcaccgcgccgagggtaatcggctccaggctctcaacgccctgtaccgtggaggtgacgtcccacagcgagatattctccaggaagccaaacgcggagtggatttctgaccacagcacgataaccgacaccagcgcgatcagcatcagcagggagcgcaccagacgcaacgactgggtactgatggcatcaagatcgacctcgctgacctctgcttccatcgaaccttccgggctgctggtatgctggacttcctcttcgccgcgggcgcgctgggcgaggatctccgcccgacggtgcttcgcgcgatcgaacgccaggcggcgccgctggatcagcatccagcggcgtatgatgtgataaaccaccagcagcaggaaccagatggcgaccgaggtttcaagcctggcgagcagcgcctgcgacgtggcgagatagccgatcgccgccgccagcatcgctatcagcggcgcgccgagcagcatattccacagcagccggttcagcatattgtcgccgctgccttctttgtcgagatacagcggaatgccggcgcgtttcaggctcagggttaccatcgccagcgcgccgcaaatcagcataaagcagaggcggcccagcgaggcggagaactcgcgatcgttgaggttatcgaaagtaatcagcgccataatcagcggcacgatcagcccgatgctcatcaggtagtagcgcatcgctttgctgacgcggctgcgcggccagccaaagtgggcgataaacaggccgttagggcgggcgaacgtggcgcaaatcatcacgacccacagcagcggtaccgtggcggtgacgctatcgccaatcgctacggccagcgggaaaggccaggcggcctgcagcccgtagcccagcgtcatccacagcaccggcagcggcgaggccaccagtatggaccagaacaccgtgcgcagggtgagccagaagtgatcctgcgtaaccttaccgacgcgcgcgctggagcgctcaaggaagctggtgaaatggcggcgtgagctaatactgaaccccaccagaatgagcgcgatgaagagcggcagcagggtctctttgctggtcagcatcatcatgctggccttaccgagctggctcatggtatcgagcgagatcaggcggcggagatcctgaacgatctccagcggccatgagaagccgattgggctgacgtccgaggtccagaacagatagcgatgggtcgcttcgttgatctctttaagcgcatcctctagctgaccgttagcgaccttcagcttggtcagttcgagcataagcgtatcgccgccgcgcagcagggagttgagcagctcggtctgcgtgcgcatctgggcctgcagaatacggttctgttccgcggtgagcggttcaccgctggcctgacgaatttgtcttagctgcggctgtttgccgagctgatcctcatagcgcaggcgctgcacgcgcagctgcgccatttcggtatccagctgctgcggccgcgggatttccggcagccgcgccacctgcgcgcgcagggcttcaccaagcagattggaagagcccagccactgggactgctcgcgcagggtgtttaacgcctgacgcacctggagggtctgatttgtcgcctggcgctgctgcgaggcgatcaaatccatccgctgcgcctgctggttgagcgcctgcgacagctcgcggttaactttaaactgcgccacgatatccggcggcaggttttcgctgttttccgccagcagttcggtgctttccagcgctttttccgcctcacgctgccgttggttattgagctgatttcgcagcgcctgtagccaggcgtcgagctgctcgctctctttctgcgccagctcagatcgcaaccgtgagagctcctggcggttattggcggaaagctgcgccagatccagctcatcgaccagcgctttcagccgcgcggactccgcctgcagaccaagattttgcgcctgtgccagcggggtattgctgctttgcgcgccgacccggcgttcaacctcattcagctggcggcgggcatcgctctgctgctgcggcagctggttgagggagtcggcgatgtcgcgggcgcgatcctgctcctgctgagctttacgactggcttccagcagctggctgctgacctggagaatctcctggttcagggcatcggaggagagggtagtggagacctggcgcggctcatcgctgagattgttgagctgcgcgcgcaggttttgcgacagtttggggaagttatcgataacgtcctggtactgacgggcgcgctcaagggaggcattacgctcctcaagggcgttcagggcagattgcaggacttcaacggtttcaggctgggcgggctttgccgccttcgcctgttccagttcctgggctatctgtttagcatccggggctgtcgctgcgtacgccccaaaactgaggcaccaggccaacaggaaagtgtatatcaggcgcacggcgtaaccttttttcaggaattaaccttcgtcttgtttatcgtcaaccagcgggctggctgcgtgttcagcgcggacttcttcttccgccagcggcgcgggctctaccggcgccgcggcttcaggcgcgatcgccagcggctggcctattttggtcaccgacaggctttgtaactgctcaaccagcttcacctggcccggagcaaacaggttaatcaccgtggagcccagcttaaagcggcccatctcctggcctttcagcagggcgacggagccttcgctatcgccagcaggccaggtccagcgcttaatgatgccttcgcgcggcggcgtgacggtaccggaccacacggtttcgatgctgccgacgatggtggcgccgacgaggatttgcaccatagggccaaactcagtgtcgaacaggcagatgacgcgctcgttgcgggcaaaaagattcggcacgttttgcgcggtcagatggtttacggaaaacagatcccccggcacgtagatcatttcgcgcagaataccgttgcacggcatatgcacgcggtggtaatcgcgcggcgaaagataggtggtgacgaagctaccgttacggaacaggtcagccatctggtagttaccggccagcagcgcttccaggctgtagttatggcctttagcctgcaaaattttgtcgtcttcaatggcgcccagttggctgatgacgccgtcggcgggcatcaccagcacgctcgggtcggtgtttagcggacggacgtcgtcgcgcagcgggcgaacgaagaagtcgttaaaggtacggtagctggcggtgtcaggcttttgcgcctctttcatatcgaccttgtaatatttcacgaacagatcgatgaccagttttgtcagccagcctgctcgtttgcgtgcaccccagcctgcgaggcgggtgagccacagtttaggcagaatgtattgcagtgaaagtttaagatcgtttaacaaggtagcctccaggccattatttgtcgttcctggccccgcggagcagcggagcctgaaaaaagggggacgattctaacgatgctcagcttaaatgtcagtcatcggttgatgaaaagcttttacgcgtttttacctgtacctgcgccatgctttccagaatgcgatggtagttttcaaaccggctttcggcgatttcgcctttctccaccgcttcgcgaatggcgcagcccgggtcattgtcgtgtttgcagtcgcggtatttgcagcggcctaaataatcatggaattcgacaaagccgtgggtgatttgttccgcgtcgagatgccacaggccgaactcgcgtacgcccggcgagtcaatcacatcgccgccgtgcgggaagtggtacaggcgcgcggccgtggtggtgtgctgccccagtccggagacatccgaaacgtcattggtgaggatttggtcatcatgcaggcccagcagcgcgttcagcaggctggatttgcctacccctgactgcccggcaaagatactgatacgatcggtgagcgcctcttcaagcggcttcaggccatcctgcgtgcggctggagaccatcagtacgcggtaaccaatatggcgataaatgtccatttgctcgttgacgaagtccatgctcgcctgatccagcaggtcgatcttattgagcacgatcagcggctcaacgttcagcgtttcgcaggccacgaggtagcggtcgataatattcggagaaagctcaggcaagatcgcggaaacaatgacaatctgattgatattggcggcgatgggtttgacgccgtcgtagaaatccggacgcgtcagtacggaggtccgttcatggacggcctcgacgatgcccttgacgttgacgccgtcagcttcgcttttgccaggccgccagaccacgcgatcgccggtgaccagcgaacggatagtgcggcgtatgttgcaacggtggacgctaccgtcggcggattcgacatcggcatgcatgccaaagcggctaatgacggtcccttcggatttctcaccgaacaggttgtcatcaaaatcggccttctccgaagtcgttttcaggcggcgctggtggttggccttcacgcggcgctgttggcctttggagagtttatttttactcaatcgaactggctcctggtcgccctgtacgggcaaaacctctatgatacacgctattttagatgaatatagtgacgtaagaagggtggaaaataacatgagtgcagatgaaaacaacctgatttggatcgatcttgaaatgacggggctggatccggagcgcgatcgcatcatcgaaatcgccaccctggtgaccgacgcgaatctgaacattctggcggaagggccgaccattgcggtgcaccagtcagacgcgcagctggcgttgatggacgagtggaacgtgcgtacccataccggcagcgggctggtggagcgggtgaaggcgagtacccagggcgatcgtgaagccgaactggcgactatcgaattcctcaaaaagtgggtaccggcaggtaagtcgccgatctgcggcaatagcatcggccaggatcgccgcttcttgtttaaatatatgcctgagctggaagcgtatttccactaccgctatctggacgtcagcacgctcaaagagctggctcgtcgctggaagccggaaattctcgacggttttaagaaacaaggaacccatcaggcgatggacgatattcgcgaatcggtcgcggaactggcctactatcgcgaacactttattaagctttaacgcccgtgccggggccaacacgccccggtcatacccccgactatttaaaccacttctgttccatggcctggaactccggcgaggcttttacgacatccagagcggcattgatgttattcagcagctcaggatcgtctttacgtaccgcaatggcgtactgcttaccgtagtagccgggatccgtggcgcgttcgtccatcatggcgtagtcggggttatcctggagccatttcgttaacgtctcctgatcgcccatcacgccgctaatcacgccttctttcagcgcgctcagggcgctttcgtcgctgtcgtaaggcaccgcatgcacggctttttgtttctcccgcagatagtgctgatgaagggtgcctttcacgacgccgatttttttatccttcagatcggcaaaggtgtgggcggcgtctttcgcggtgacaactacgccggacagcgcctgacgatagggatggctgaacgcaacctgcttttctcgcatcggaatcacttcgataccggcaatcaaggcgtcgaatttcttaaagcgcagcgccgggatgagggtatcgaacccctggggtgtgaatttgcattcgacctgcatctgcctgcacagcgcgttggccaggtcgatatcaaaacccgtgggctgatttttaccattgacggtttcatacggcggattggccgtcgttgtcccaaaatgtagcgttgttgccgatgctgttcctgtggcaagcgtggccagcagcaggacggtaagcgcttttttcattttatttccctggttgtcatcgttgttgaccgtcagcgggcgatatccgcctataaacttgagcgattttgcgcctttagcgggccgggaaaaagtgattttgccgcatttgctggttatttagacaattcaggccggtgtgtggtgataaagtggtcacttaaaccaaaaacgaaaaaaattgcgctcaggggggttgcaggtaaatcgaattctcgtataatgcgcctcccgtgacgaagcagaaatgcaaatcacgacgccatagaaatatggccagaagtatgcgggaatagctcagttggtagagcacgaccttgccaaggtcggggtcgcgagttcgagtctcgtttcccgctccaaaatttgaaagttaccacacccaagcgggaatagctcagttggtagagcacgaccttgccaaggtcggggtcgcgagttcgagtctcgtttcccgctccaaaatttgaaagttaccatacccaagcgggaatagctcagttggtagagcacgaccttgccaaggtcggggtcgcgagttcgagtctcgtttcccgctccaaatttcttctcatacccagtttatccacagcgcaagcacgcgccggtgatgattttcgcccggtcctgaaaatactgtgaacagagttatccacaggttaacctttcgtcctctctcagaaaattacttcactatgtaaatagtattcttatatctaattgaaaaataagagttaaatttcatttcaaagtgttaatccgatcacttgacgaacgtctgccccttgaaacgcaatgtgtttttatttttattcacaccctgtgaatgaatcaggcgtcgcgcggtagccctttttcaaccaccctgaccagacgcagctttttgggtaactgcacctcaaccacattggcatttctcttttcaatttgctgcgccatcgcccactcgatatgttcgtcgagaagcgggtgctcacccctgcggctttccagcgccttcaggttcgcttcatcccagggcgcgttgcccaacgcgacggcgatattacgcagccagcgcagatgaccaatacggcgaatggccgaaccttccgtcacttttaaaaaccagggttcgctccaggcgaacagctcaataagcgccggggcgtgtagcgccttgcgcggactgaaatcctcttcatcggtgagctgcgcgaagcggttccacgggcaaatcaactggcagtcatcgcagccgtatatgcggttgccgatcagcggacgaaactcttccggaatagcgccttccagttcgatagtcagataggaaatacagcgccgggcatcgacggtatagggctcgacgatggcgccggttgggcagatggtcatacaggcaacgcagcggccgcactcttccttgacgggctggtcaatgggaagagggagatcgataagcagttcaccgaggaaaaagaacgagccggcatcgcgactaaggatgagcgagtgcttacctgtccatcccagccccgctttttcggctaaagggcgttcaagaatcggcgcggaatcgacaaaaggtctaaaattgagcgaagcacactgtccctgaatcatctcacctaattttttcaggcgatgacgtaatagcttgtgatagtcccgtccgagggcgtaacggctaacgtaacccaccgcggggtctttcagggtgcgggcgaaagcggcattagcgggcaggtagttcattctcacgctaattacgcgcagggtaccgggctggagctcatgggggcgcgcgcgcatcatgccatgacgcgccatccacgccatttcgccgtggtattgtttatccagccaggcctgcagtttaggttcgctggcgctgagatcggtatcggtaataccgacctgctggaaccccaactctgtgccccattgtttgatttgctgcgctaactgattgagatcgaggggctgtgacatgatggaccatacgatgacgaaaaacaccgggagtataccacatatcatctggtcggcggaggcgctacgacgagcggaaaaagaggcggcggatacccttgggctgacgttgtatgaactgatgcgtcgtgcgggcgaagcggcttttgagcttgcgcgcgtccagtatcctgaaagccggcactggctgattctctgcggccacggtaataacggcggcgacggctacgtggtggctcgcctggcacagtcgcgaggcattcaggtcacgctgctggcgctggagagcgagaagccgctgccggaagaggccagcctcgcgcgtgaggagtggctcaacgccggcggcacgattcatgccgccagcatcccctggccggaagatatcacgctgattattgacggcctgctcggtaccgggttacagagcgcgccccgggaaaacgttgcggcgctgatcgcgcgggcaaacgcccatccggctgcggttgtggcgctggatatcccctccggcctgaatgcgcaaacggggacgacgccgggcgcggttatccatgccgctcataccatcacctttatcgcgcttaagccggggctgctgaccggcaaagcccgcgatgtcgttggccgtttgcatcaccacgccctggggcttgagggttggctggcaggccaaacgacggcgctcagtcgcttcgatgcctcgcagctccccggctggctgccgccgcggcgtccaacctcgcacaaaggcgaccacggtaagctggtgattattggcggcgaaccggggacggcgggcgccatacgaatgagcggtgaagcggcgctgcgcgcgggcgccgggctggtgcgagtactgactcaccgggacaacattgcccccattctgaccgccaggccggagctgatggtccatgagctgacgtcccgctctctcgaagagagtctgcactgggcggatgtcattgcgattgggccgggtctggggcagggcgagtggggtaaaaatgcgctacgccaggcggagaattttcgcaaaccaatggtctgggatgcggatgcgctgaacctgctggcaatcaatcccgataaacgtcacaatcgcgtgctgacgccgcatcccggcgaagccgcccgcctgctgaacgtgagtgtggcagaaattgaaagcgatcgcttacattctgcacaacgtctggtaaaacgttatggtggcatcgtggtgctgaaaggtgcaggtacgatcgtggcgagcgaaacgggcgaaatggctattatcgacgccggtaacgctgggatggccagcggcgggatgggcgatgtgctgaccggtattgtcgctgcgttgttaggccagcgcctgacgccgtatgatgctgcctgcgccggatgcgttgctcatggcgaagccgccgatcggctggcggcgagacacggcacccgcggaatgctggcgaccgatctttttttcacgctcaggcgtgttgttaacccggatgtgattgacgtagaccatgattaaccgagtgattcctttacccgatgagcaggcgactttaagccttggcaaccgcgtcgcgcaggcatgcgctggcgcgacggtcatctatttgtatggcgatttaggggcgggtaagaccacctttagccgcggtttccttcaggctctcggtcaccgtggcaacgttaaaagcccaacctacaccctcgtcgagccttacagtctcgataatttgatggtctatcacttcgatctttatcgcctggcggatcctgaggaactcgagtttatggggatccgcgattattttactgacgatgctatctgcctggtggaatggccgcagcagggcacgggagtactgccggacccggatgttgaaattcaccttgagtatcaggcacaagggcgtgaggcgcgcgtaaccgcggtctcctcattgggtgagtctttattggcgcgtttggctaattagcctgaaggacgacgggatgatgtatcgcttaaccagttggctggccgccgcactgatgctgttcagcattcaggccactgcggcaagtttatccgatatccaggtctcaaatggcgatcggcaggcccgcattaccattagctttatcggcgaacctgaatattcgtttaccccccagggcaaacgcatcgtggcgctggatattaaacagactggcgtactccaggggctaccgctgcagtttagcggcaataatctggtaaaaagcattcgttccgggacgccgcaggatacgcagtcgttgcgcctgctggtggatctcaccgccgacggcaaaacccgcgcggtgaaacagcagaacggctctaactacaccgtggtgtttacgattaacgccgacgcgccgcctccgcctccaccccagccggtggtggttagacaggcggaaaggcccgtggcgcagcccgtgcgtccgagcgaacccgcgcgcaacccgtttaaagccgataacgaccggctcaccgcggtgaccagcaccagtagcgtaacgcgtcctgcggcgcgtaccgtttccggcgacgataaagtgattatcgccattgacgccggccacggcggccaggatccgggagccattggtccgaacggcacgaaagagaagaatgtgaccatagcgattgcgcgcaagctccgcgcgctgctgaatgccgatccgcagttcaggcccgtgctgacgcgcgacggcgattatttcatttccgtcatggggcgttctgacgtcgcacgtaagcaaaacgccaatttccttgtctcgattcacgccgacgctgcgccgaatcgcgatgctaccggggcctcggtttgggtgctttccaaccgccgcgcgaacagcgaaatggccggctggctcgagcagcatgagaaacagtcagaactgctgggcggcgcgggcgatgtactggccaacagccagtcggacccttacctgagccaggcggtgctggatttacagttcggccattcccagcgcgtcgggtatgatgtggcgaccaatgtgctgagccagctgcagcggatcggcgatttacataagcgtcgtcctgagcatgccagcctcggcgtactgcgttcgccggatatcccgtcgatcctggtggaaacgggttttatcagtaataccggcgaagagcggctgctgggcagcgatgcttatcagcagcaggtcgcagaggcgatttataacggcctgcgtaactactttatgcagcaccctctgcaatccgcgccgcgcggggcagccgcgcagactgccagcgcaggttcgtcagacgggacgttgttaaattaaggagacggccatgccgattcaggttctaccgccgcagctcgccaaccagattgccgcaggtgaagtggtggaacgtccggcgtcggtggtcaaagagctggtggaaaatagcctcgatgccggggcgacgcgtatcgacattgatattgagcgcggcggggcgaagttaatccgcattcgcgataacggctgcggcatcaaaaaagacgaactggcgctggcgctggctcgtcacgccaccagtaaaattgcttcgctggatgaccttgaggcgatcattagcctcggctttcgcggcgaagctctggccagtatcagctcagtggctcgcctgacgttgacctcgcgtaccgaggagcagcaggaggcctggcaggcctatgccgaagggcgcgatcaggcggtcaccgtgaagccggcggcgcacccggtgggaacaacgctggaagtgctggatctgttttataacacccccgcccggcgcaaatttatgcgcaccgagaaaaccgagtttggccatatcgacgagatcgtgcggcgcatcgcgctggcgcgcttcgacgtgaccatcaacctcagccacaacggcaaggccgtgcgccagtaccgggcggtatcgcaggacggtcagcgtgagcggcgtctgggcgcgatctgcggtttgccatttctcgaacacgcgctggcgattgagtggcagcacggcgacctgaccctcagcggctgggtggccgatccgctacataccaatccgacgctggcggagattcagtattgctacgtcaatgggcggatgatgcgcgatcgcctgattaatcacgcgattcgccaggcctgtgaagacaaactgggcgccgaccagcagcctgcctttgtgctatatctgaagatagatccgcatcaggtggatgtgaacgtccatccggccaaacatgaagtgcgttttcatcagtcgcgcctggtgcatgactttatctatcagggcgtgctgagcgtcctgcagcagcagctggaggtgccgttggcggaagagggcgatgagcccgcgccgcgacaggtgccggaaaaccgcattgcggcgggcggcaatcattttgcccagccggcggtcgcgcgtgaaagcgccgctccccgttaccgggatgagcccgccgcgccgcgttttaataccggaggttcgcgagagtccgccgcctcgggttcatctggcggagccgcctggccgcacgcgcagccaggctaccaaaaacagcagggtgcgctttatcgccaactgctggacacgccggccacggagcgcaaacccctggctcccgcaccggcagcggaaggcctgtcgggtcatagccaaagctttggccgcgtactgacgattatcgatagcgactgcgcgctgctggagcgcggcggtaagttagcgctgctggctctgccggttgctgagcgctggctgcgccaggcgcagctaacgccgggcgcagaggtggtttgcgcccaaccgctgcttattccgctgcggataaaagtgtccgacgaggaaaaagacgcgctcaagcaggcgcagtcggcgctggctgaggtcggtattgaactccagtccgatgcgcaccacgtgacggtccgcgcagtgcctttacccttaagacaacaaaatttacaaatcttgattcctgaactgataggctacctggcgcagcaaaaaaccgtcgacgtcagcaacattgctcagtggatagcgcgtaatctggcgagcgaacatgcgcagtggaacatggcgcaggcgattgccgtcctggcggatatcgaacgcttatgtccgcagctggttaaagcgccgccgggtggtctgttacaacctgttgatttacattcggcgatgaatgccctgaaagatgagtgatgtaactgaggcaagcctgcctaaggcaatatttttaatgggccctacggcctctggtaaaaccgcattggctatcgccttacgtaaagttttgccagtagagttgattagcgttgattcagccctcatctatcgaggaatggacataggcacggccaagcccgatgccgcggagctgagcgctgcgccgcatcgtctgctggatattcttgacccggccgaggcttattccgcggcggatttccgccgcgatgcgctggcagagatggccgatatcgtcgctgccgggcgaattccgctactggttggcggaacgatgttgtatttcaaggcgttgttggaaggattgtcgcctctaccctcggctgaccctgaggtcagagccaagatcgagcaacaggccgcagagcagggatggaacgcgttacaccagcagctacaggaaattgatccggttgccgccgcgcgtattcatccaaatgatccgcaaagactttcccgagcactggaagtttttttcatttcgggtaaaactttaacggagctgacgcaaacgtcaggtgatgctctgccgtataaggtgcaccagttcgccatcgccccggcgagccgtgaactgctccatcagcgcatagaacagcgttttcatcagatgttggcttcaggttttgaagcagaagtgcgggcgctttttgcccggggagatttgcatacggatatgccttccattcgttgtgtcggatatcgccagatgtggtcttacctaaatggcgagatcccgtatgatgaaatggtttatcgaggtgtttgcgccacgagacagttagctaaacgtcaggtgacctggctgcgcggttgggaaggtatccactggttagacagtgaacaacctgaacaagcgttcaacaaagtattacaggttgttggtgctagcctggactgaacgtgtacaattgaacgggtatcgtgcgtaatttttttaagaatcgtaaggttctgagtacaaaacaagcatacatataaggaaaagagagaatggctaaggggcaatctttacaagatccgttcctgaacgctttgcgtcgggaacgtgttccggtttctatttatttggtgaatggtattaagctgcaagggcaaattgagtctttcgatcagttcgtgatcctgttgaaaaacacggtcagccagatggtctataagcacgcaatttctactgttgtcccgtctcgcccggtgtcacaccacagcaacaatgctggcggcggtacaaacaactatcaccacggtggtggtgcgcagggttcttctgcgccgcagcaagacagcgaagacgccgaataaggcagatgctgtttttccacgtcggggagccaggttttctgcgttccccgctggtattttataaggggtttacgcttgtttgaccgttatgatgccggtgagcaggcggtactggtacacatctatttttcgcaagacaaagatatggaagatctccaggagtttgaaactctggcctcttccgccggtgtcgaagcaatgcaggtgattaccggtagccgtaaagcaccgcacccgaagtattttgttggtgaaggtaaagcagtcgaaattgcggaagccgtaaaagcgaccggtgcatcggttgtgctcttcgatcatgccctgagtccggcacaggaacgaaacctggagcgcttatgcgaatgtcgggttatcgatcgtaccggcttgattttagatatttttgcccagcgagcgcgtacccacgaagggaaactgcaggtcgagctggcgcagctgcgccacatggcgactcgcctcgttcgcggctggacccaccttgaaagacagaaaggcgggattggtttgcgcggcccgggggaaacccagctcgaaactgaccgccgcttgctgcgtaaccgtattatgcagatcctggcgcgactggaaaaagttgaaaaacagcgtgagcagggacggcggtcacgcgccaaagccgatattccaaccgtgtcgctggtcggttataccaacgccggtaaatccacgttgttcaatcagataaccgaagccgaggtctatgctgcgaaccagctgttcgccactctggacccaacgctgcgccggattgatgtccctgatgtcggcgaaaccgtcctggcggataccgtaggctttattcgccacctgccgcacgatctggtggccgcgtttaaagcgacgctccaggagacgcgccaggcgacgctgttgctgcatatcattgatgcggccgatgtgcgcgtgcaggaaaatattgacgcagttaatacggtgctcgcggaaatcgaagctgatgagatcccggcgctgctggtcatgaataaaatcgacatgctggatgattttgagccgcgtatcgatcgggatgaagaaaataaaccgattcgggtctggctttccgcccagaccggggttggcgtaccgctgctttttcaggctttgacggaacggctttctggtgaagtggcccagcacacgctgcgcctgccaccgcaggaaggtcggttgagaagccggttctatcagcttcaggcgatagagaaagagtggatggaggatgacggtagcgttggtctgcaggtgcgcatgccgatcgttgactggcgtcgcctctgtaaacaagagccagcgctggttgaatacgtgatttgaccttgcagcttgcctgaagatattgacccctgtggggatatcaaaaacaaatatggagcatatacatggcgtggaatcagcccggtaataacggacaggaccgcgacccgtggggaagcagcaataaccaaggcggcaactctgggggaaatggcaacaaaggcggtcgcgagcagggacctcccgatctggatgatatcttccgtaagctaagtaaaaaacttggcggcctgggtggcggaaaaggtggactgggcggcggtagcggctctcagggacctcgcgggccaatgggcggacgtatcgtcggcatcgttgccgccgctgcggttattatctgggcagccagcggtttctataccattaaagaagctgaacgtggcgtcgtcactcgctttggtaaatttagccatctggttgagcctggccttaactggaaacctactttcattgataacgttcaggcggttaacgttgagtcggtccgcgaactggcggcttccggcgtcatgctgacgtctgacgaaaacgtcgtgcgcgttgagatgaacgtgcagtaccgcgtgaccgatccggaacgctatctgtttagcgtcaccagcgcggacgacagcctgcgtcaggccaccgacagcgccctgcgtggcgtgatcggtaaatacaccatggaccgtatcctgaccgaaggacgtaccgtcattcgtagcgatacccagcgcgagctggaagagaccattcgtccgtacaacatgggtatcaccctgctcgacgtcaacttccagacggcgcgtccgccggaggaagtaaaagccgcgtttgatgatgcgattgccgcgcgtgaaaacgaacagcagtacattcgtgaagcggaagcttacaccaacgaagtccagccgcgggctaacggtcaggcgcagcgtatccttgaagaggctcgcgcctataagacccagaccgttcttgaagcgcagggtgaagtggctcgttttgcaaaaattctgcctgagtataaagcggctccggaaattacccgcgagcgtctgtatatcgaaaccatggaaaaagtgctgagccatacgcgcaaagtgctggttaacgataaggggagcaacctgatggttctgcctctggatcagatgctgaaaggcgccggcgcgccggcggcaaagagcgatagcagtggcgcaagcgatctgctgcgtctgccgcctgcagccagctcaaacagcgccagtaacgcttctacctctacgggaggcaccattatggaccaacgccgcgccaacgcgcagcgtaacgactaccagcgtcagggggaataacgatgcgtaaatctgttatcgcgataattgtcatcgtgctggtggtgctctacatgtccatctttgtggtcaaagagggcgagcgcggcattacgctgcgttttggtaaagttctgcgcgacgatgaaaacaaaccgctggtgtacgcgcctggccttcacttcaagattccttttattgaatccgtgaagatgcttgatgcgcgtatccagacgatggacaaccaggccgaccgctttgttaccaaagagaagaaggacctgattgttgactcttacatcaagtggcgcatcagcgactttagccgttactacctggcaaccggcggcggtgacgtttcccaggccgaggtgctgctgaagcgtaaattctctgaccgtctacgttctgaaattggccgtctggatgtgaaagacatcgtgaccgactcccgcggccgtctgaccctggaagtccgcgatgcgctgaactcaggttctgcgggcacagaagatgaagtcagtacgccggctgccgatgacgcgattgctaaagcggcggagcgtgttgaagcagaaacgaacggtaaggttcaggtgatcaacccgaacagtatggcggcgctgggtattgaagtcgtcgacgtgcgtattaaacagatcaacctgcctgccgaagtgtctgaagcgatctacaaccgtatgcgcgccgagcgtgaagcggtagcgcgtcgtcaccgttcacagggtcaggaagaagctgaaaaactgcgcgcgaccgcggattatgaagtgaccaaaacgctggcggaagccgagcgtcaggggcgtattctgcgcggtgaaggcgatgctgaatcggcgaaactgtttgctgatgcattcagccaggatccaggcttctatgcctttatccgtagcctgcgtgcgtatgagaacagcttccagagcaatcaggatgtaatggttctcagcccggacagcgatttcttccgctatatgaaatcacccacgtcagcgacccgctgataagcaatgagtaagcaaaaaggcgcccgttgaggcgccttttttacaatgttcgcagcggatttgggttcgccaatgggttatgtattttgtttcataaagccggttcataacaatgatgaaataccggagaatatgaattgagcaacgactcacaggggtgagcgacggtggctgtacttaaataaaggtgaataatgaactcaacaatctggctggcactggcgctggttttagtacttgaagggcttgggccattgctttatccgcgcgcgtggcgtcgaatggtcgccacgatgagccaattaccggataatttattacgccggtttggcggaggtcttgtggttgccggtatcgtcatctactacatgttgaggaaaacgattggctgagcgtaaagtagactaatttcccgccttttgagtgcaaaaagtgctgtaactctgaaaaagcgatggtagaatccatttttaagcaaacggtgattttgaaaaatgggtaacaacgtcgtcgtactgggcacccaatggggtgacgaaggtaaagggaagatcgtcgatctcctgactgaacgggctaaatatgttgtgcgctatcagggcggtcacaacgccggccatactctcgtaatcaacggtgaaaaaaccgtcctccatctcattccatcaggtattcttcgcgagaatgtcaccagcatcatcggtaacggtgtcgtgctttctccggctgcgctgatgaaagagatgaaaggtctggaagaccgtggtatccctgtccgcgagcgtctgctgctttctgaagcgtgcccgcttatcctcgaatatcacgttgcgctggatgttgcgcgtgaaaaagcgcgcggcgcgaaagctatcggtacgaccggtcgcggtatcggcccggcttacgaagataaagtggctcgccgcggtctgcgcgttggcgatctgtttgataaagccaccttcgctgagaaactgaaagaagtgatggaatatcacaacttccagctggtgaatttctacaaagctgaagcggttgactaccagaaagttctcgatgacgtcatggcgattgccgacatcctgaccgcgatggttgttgacgtttccgatctgcttgaccaggcgcgcaagcgtggcgatttcgtcatgtttgaaggcgcacagggtacgctgctcgatatcgatcacggtacctatccgtacgtaacctcttccaacaccaccgcaggtggcgtggcgaccggctccggtctgggtccgcgttatgtagactacgttctgggtattatcaaagcctactccactcgcgtaggtgcgggtccgttcccgactgagctgtttgatgaaaccggcgagttcctgtgcaagcagggtaacgagtttggcgctaccaccggccgtcgtcgtcgtaccggctggctggatgccgtagcggtgcgccgcgcggtgcagattaactccctgtccggtttctgcctgactaagctggacgtcctggacggcctgaaagaagttaaaatctgcgtagcctaccggatgccggatggccgcgaagtgacgaccactccgctggctgctgacaactgggaaggcatcgagccgatttacgaaaccatgccgggctggtctgaaaccacctttggcgtgaaagagcgcagcggtctgccgcaggcagcgctgaactacatcgcacgcattgaagagctgaccggcgtaccggttgatattatctctaccggtcctgaccgtaccgagacgatgattttgcgcgatccgttcgacgcataacgatctccaggggcgccgttaaggcgcctcttgtttttgctgttcgcccgccccatttaaataaattagcggcctgagcgctggctggtttatcatcaatagtaattgtctaccgacgcactctgtttttcttttccctgaggttgattgtgcagttaacgagtttcactgattacggattacgcgcgctgatttatatggcgtcgctaccggatggaagaatgaccagcatctccgaagtgacggaggtttacggcgtttcccgtaatcatatggttaaaataatcaatcagctaagtcgcgtggggtacgtgacggcggtacggggaaaaaacgggggaattcgtctggggaaaccggcaaatatgattcgcgtgggtgatgttgttcgcgatctggagccgctctcgttggtcaactgcagcagcgaattttgccatattacgcccgcctgtcgtctgaaacaggcgcttgctgaagccgcgcaaagttttctcaaggaactggataactacacgctggccgatttggttgaaaagaatcaaccgctttataaattattgctggtggagtgacgtaaacttcactggagatgacaacggaggaaccgacatgtcacaagatcctttcctggaccgcgaatctgaaaaatacgctaatccaatcccgagccgggaatttatcctcgatcatttagcaaaacgcgaaaaaccggctagccgagatgagctggcaatagagctgaatattgaaggcgaagaacaacaagaagcattgcgccgcagactgcgcgcaatggaacgcgatggtcagctggtctttacgcgtcgtcagtgctatgcgctgccggaacgtcttgacctgctgaaagggaccgttatcggtcatcgcgatggttatggcttcctgcgcgttgaaggccgtaaagatgacctgtatctgtcgtccgagcagatgaaaacctgtattcacggcgatcaggtgctggcgcagccgctgggcgccgaccgtaaaggccgtcgcgaagcgcgtattgtccgcgtactggtgccaaaaacgggccagattgtgggccgctactttaccgatgcgggcgttggcttcgtggtgccggatgacagccgcctgagcttcgatatcctgatccccccggaacagatcatgggcgcgcggatggggtttgtggtggtggttgagctgacccagcgcccaacccgccgcaccaaagcggtcggcaagatcgttgaggtcctcggcgacaatatgggtaccggcatggcggtcgatatggccctgcgcacccatgaaattccctacgtctggccgccagcggtcgaaaaacaggtcgccggcctgaaagaacaggtaccggaagaggcgaaacaagggcgcgttgatttacgcagcctgccgctggtcaccattgatggcgaagacgcccgtgactttgatgatgccgtgtactgcgagaagaaacgcggcggtggctggcgtctgtgggtggcgatcgccgatgtgagctactacgtgcgcccgggtacgccgctggatggcgaagcgcgcagccgcggcacgtcggtctacttcccgtctcaggtggttccgatgctgcctgaagtgctctctaacggcctgtgttcactgaatcctcaggtcgacaggctctgtatggtttgtgaaatgacgatttcggccaaggggcgtctgaccggcttcaaattctacgaagcggtgatgagctcccatgcccgtctgacctataccaaagtctggcatatgctgcagggcgaccaggatctgcgtgagcagtacgcgccgctggttaagcatattgaagagctgcataacctctacaaagtgctggacggcgcgcgtgaagagcgcggcggtatctcatttgagagtgaagaagctaaattcatctttaatgctgaacgccgcattgaacgtattgagcagactcagcgtaacgacgcgcacaagctgattgaagagtgcatgatcctggcgaacatctccgctgcgcgcttcgttgagaaggccgaggaaccggcgctgttccgtatccatgacaaaccgagtacggaagcgattaccgcattccgttcggtgctcgcggagctggggcttgagctgcctggcggcaacaagccggagccgcgcgactatgcggaattactgacctctatcgccgatcgtccggatgcagagatgctgcaaactatgctgctgcggtcgatgaaacaggcgatatacgacccggaaaaccgcggtcactttggtctggcgctgcaatcctatgctcacttcacctcgccgattcgccgctatcctgacctttcgctgcatcgcgcgatcaagtatttactggcgaaagagcagggacataaaggcaatagcaccgagaccggcggctggcactacagcatggacgagatgctgcagctgggggcgcactgttcgatgaccgagcgtcgtgctgatgaagcgacgcgcgatgtttcggactggctgaagtgtgatttcatgctggatcaggtgggtaacgtctttaagggcgtgattgccagcgtgaccggctttggtttcttcgtccgtctggatgagctgtttattgatggtctggtgcacgtctcttccctcgataacgactactaccgcttcgatcaggtcggacagcgtctgattggtgaatccggcggccagacctatcgactgggcgatcgcgtggaagtgcgcgttgaagcggtcaacatggacgagcgtaaaattgacttctcgcttatctccagcgagcgcgcgccgcgcaacgtcggtaagaccgagcgtgaaaaagcgaagaagggcggcgcaggtaaatcttccggacgacgccgtcaggcgggcaagcaggtaaacttcgagccggatagcgcattccgcaaacagaaaggtcagtctcagccgaaagccgctcagccaaaaggcgagaagaaagcgaagaagccgtcggagaaaacccagaagatagccgcagcgaccaaagccaagcgcgcggcgaagaaaaagaatatcgctgagtagtgcgattccctttccccccgcacctcccgacatcgtggcggggcggggggaagggaacggataacagaacctaaacgagtagataaatgagtgaaatgatttacggcatccacgcggtgcaggcactgctggagcgcgctcctgaacgttttcaggaagtctttattctgaaaggccgtgaggataagcgccttatgccgctgatccatgccctggaagcgcagggcgtggtgattcaggtcgccagccgccagtttctggatgagaaaagcgaaggcgccgttcatcagggaattattgcccgcgtgaagcccggacgtcagtatcaggagaacgatctgccggatctgatcgcctctctcgatcagccgttctttttgatccttgacggcgtgaccgatccgcacaacctcggcgcctgtttacgtagtgctgacgccgctggcgtgcatgcggtgattgtccccaaagatcgttctgcgcagctgaatgccacggcgaaaaaagtggcctgcggcgcggcggaaaacgtcccgctgatccgcgtcaccaacctggcgcgtaccatgcgtctgctgcaggaagagaacgtctggatcgtcggtaccgccggtgaggccgatcatacgctgttccagagcaaaatgaccggatcgctggcgctggtcatgggggcggaaggcgaaggcatgcgccgcctgacccgggagcactgcgacgagttgatcagcatcccgatggccggtagcgtgtcgtcgctgaacgtatcggtagccaccggtatttgcctgtttgaagcggtacgccagcgcagctaatctcttctttccaaataagccattctctggaatggcttatcttcttcagttctgaccgccttctcgctctatccgacgggcaatgtcgagacctctttcaacatagttcaggacctggctcaagggtaattcctctcccggttcatctcccgtttgctcgaggaatttaagctgcgcgcctcgattctttaatactttgatgagattaagaaaacttccaataggattctgctcttccagaatgtcatcgcagattttgttttcatcaaatgaggtgacgtaaccggaagcgttcaggttctgtttgatagcgctcatcgcgagatgaggaagatggtggtggataagcggaatatagttcggcgcattttgccgatcttcaataattaaatgaatcatgaaattccctttctgattgtgagagaactttataacagagttctctgacggaaagtgcgccgttgtccatacttatggatagagccattgaaggagggaaacataatgcactggcaaactcataccgtatttaatcaaccctcgccgctatgtaacagtaacttattcctgtccgataccgccctgcgtgaagccgtcatccgcgaaggcgcgggctgggatggcgatctgctggcgagcattggccaacagctggggacggccgaatcgctggaactggggcgcctggccaacagcaatccgccggaactgctgcgctatgacgcaacgggatcgcgtcttgacgatgttcgtttccatcccgcctggcatttactgatgcaggggctgtgcgctaaccgggtacataatcttgcctggcaggaagaggctcgcgaaggtgccttcgttgcccgcgctgcccgctttatgctgcatgcgcaggtcgaggcgggcaccctgtgccccactaccatgacctttgccgctattccattgctgcagcgctccttacccgagacttttagcgactggctatcgccgctattaagcgatcgctacgatccgcaccttgtgccgggtaatcagaaacgcgggctgcttatcgggatggggatgacggaaaagcagggcgggtccgatgtcctgagcaacacgatgcgagcggagaaaagcgcagaaggcttttatcatctgatcggtcataaatggtttttctcggtaccgcagagcgatgctcatctggtgctggctcaggcgccggcgggcctctcctgcttttttgttccgcgcctgttgccggatggacagcgtaacggcgtacatctggaaaggctgaaagataaattaggtaaccgcgcgaacgccagcagcgaagtcgagtttttcaatgcctgcggctggctggtcggggaagagggcgatggcgtccggcaaattctcaaaatgggcggcctgacccgttttgactgcgcgctgggtagccatgcgctgatgcgccgggcctattcggtagcgctataccatgctctgcagcgtcaggcatttggtaaaaatctggtcgatcagccgataatgcgtcaggttctggggcagatggcgctgcggctggaaggacaaaccgcctttctgttccgcctggcgagggcctgggacaggcgcgacgatgtgcaggaagcgctatgggcaaggctgttcacgcccgccgcgaaatttgctgtctgcaaatccgggatcgcgttcgtcgccgaggcgatggaggtactgggtggctcaggctattgtgaagagagtgaattaccgcgtttgtaccgtgaaatgccggtaaacagcatctgggaaggttccggtaatattatgtgtctggacgtgatgcgggttctgatgaagcagccggcggcgctcgaacttctggcggcggagtgcgcggaagtgaaagggcaaaatcgtcatttcgatcggacgtggcggcagctgcagcagtggctacggcggccgctggaagagcaggggcgggagattacccggctggtctatatgctgggcgttggggcgcagctattacgcttcgcgtcaccgccgctggccgaggcctggtgccgtatgatgctcgacgcgcgcggcggcatgcgcctggatgagcagacgctggatgacttactgttacgggcaacggggcgtggacgacaggcgcctcaggcataaagaatggcctgtacccgccagttatccggctgctgctcctcgtacatctggacgatgcgataccaggaggcgccctgctcatcggcctgcacggcgatagcgtgttcaacatcctgctggctgcccgagatgttgttaacgcaaatcaggccaatttcgttcaggcccgttacgcagtcagcgctggcaaactccgctgactgcgcggaagtattggccgtgacggtggtcaacatcaggctgggtagggtaaaagttcgtttcatcgtcagctccatttcacatagtcctgagggcagtccgttgctaacgttctgcctggttacagctggccgaacgttattatgcacagaagaacgtgaatggatgcaaagcagtgtaaagctggcttaaaggttgaccgctatttacggtacaaaattgcctgcgaataccactggcccggaaccatggtgtcatcaatcattatgatgacgtagtaatccgctttagccgcctcagctttgacctttagcgcagcctcgacatccatcggtgagccgtacattaatacgctcaccgtccccatcttctgcagacccgccgtctgattacgctggatctcttgtggatggtcggttgccggcggcggcgcctttggcgtcccctgtagggcgctacagccggttaaagcgattgccattaaccacggtgcaaacctacgcataaccatatctcgtttcctgttagtcatagtgtagtggtagcctgaatgtcatttccggggaatgttcccaaattgttatcccgtacgcgattttcgaatgaaaatatcgtgaaagcgtaatctggttctcaagattatgaatcatgtgcgaacgagcgacttgagtaataacataacatcacttgagagaaaggagacggtaaatgatcgcactagaaatgcgtaaccttgcgggtggggaggttctccatgcgtacccgcagggcgccgcggatacggcgctgccttgcattgtcttttatcatggttttacctcttctaagctggtctacagctattttgccgttgcgcttgcagaggcggggtttcgggtgattatgcctgatgcagcggaacacggcgcgcgctaccggggagacgaacaggggcggatgcagcgcttctggccgattctgatgaacaattttattgaatttccggcactacaggaggcgattcgggatcggggatggcttgctgacgacaggctggcggtggcaggcgcatcgatgggcggaatgacggcattagggattatgacccaccacccggagctgaaaagcgtagcctgcctgatggggtcaggctatttcagttcgctctcgcaggcgcttttcccttcgccttcgttcgatgcagaacagctggtggcgtgggacgtcagccagcagctggcgaccctggccagccgtccgctgctgctctggcacggcgatgaagatgatgtcgtgccgccgggggaaaccttccgcctgcagcaggcgctgcagcaaaacgcgctggccgacaatttaacctgcctctggcagaaaggcgtccgccaccgcattacgccggaagcgttagccgcgacggtggacttttttcaacgtcacctttaaacgcgaatcacctgtacgccctgatcttcaagctgcttgaggatcgcctcatccgcctgtttaccggtaatcaccaggtcgatttgcccggcctggctaaagagcattccggcgcgttcgccgactttgctgctgtcgaccaggaccgcgagtttgccgacgacgttaagcattttttgctccgccatcgccgtcagcatatcggttttatacagcccttcggcggtcaatcctttgccgctggtgaacatccagtgcccggcatacaggctgttttcgctgccctgcgggctcagggtgatagagtggctgcggttatactgcccgcccataatgatgacgctgtcgtgttcctgatcgatcagatagttggccagcggcaaatagttggtgatgatctgtaccggtttgccgcacagctcctgcccaagcaggaatgcggtagagccgcagttaatgacgatgctttcgccagggttgaccagctgcgaagccgcacgcgcaatccgtaccttctcatcgtggttttgcgcctggtgaatattcattggcgaccagcgcgggcgctgctcgctgatggcttccgcgccgttgcggacttttttcagcctgccgctttcgtcgagtttgttgatatcgcgtcgtgccgtcgccggagaaattcccagccgggaaatcacctgctccacggtgacaaatcccgtttgtgccagcaaatccagtaaaatttgatgtctttgcgcttccgtcatgagcaaatccgattaaaagtgataagcaaagatgatatttgaaatcaggtgaaaatactaatgctgacggggataatttccggcgggcggtcccgccggagaagccttacaggaacgacttaaagggcaggtccggttccatcgtgaagcaatcgtcgaatccgcgcggataatggtattcgaagttgtctttatccagcggccaggtgaattttccgcccacctgccagatgaaaggcttaaagccatactgcagacgatcttttttcatctcccacaaaacgcggatttcctgcggatcggcctggaagtttgaccagatatcgtgatggaacgggattaccactttagcattcagcgactcggccatgcgcaggatatcggcgctggtcattttgtcggtgataccgcgcgggttctcgccataggagcccagcgccacgtcgatctggtgttcgttaccgtgcttcgcgtagtagttggagtagtgggaatcgccgctgtgatacaggttgccgcctggcgttttgaacaaatagttcaccgcgcgctgatccattccgtccggcaggacgcctgcggctttttgatccgcgggtaaggtgatcagggccgtacggtcaaaagcgtcaagcgcgtggatttcaacatcctttattttaaccacatcccctggtttcatcacgatacagcgctcttttggaacgccccagcctatccacaggtcgacgcaggtttgcgggccgatgaacggcacgtcctcggcgcagttctgcatgaccgcggcggccacgttcacatcaatatgatcgttatgatcgtgggtggacagtacggcgtcgatctggcgaatagcgaacggatcgagaacaaacggagtggtgcgcaggtttggctggagtttcttcacgccggccatacgctgcatctggtggcccgttttcatcagcgggttcccgtggctttgcttgccggtaccgcaccagaaatcgacgcagatattggctccgccctcggatttcagccagatgcccgtacaacccaaccaccacatggcaaaggtgcccggcgcaacctgctcttgttcaatttcttcgttcagccagctaccccactccggaaaagtgttcaggatccatgattcgcgggtgatggtttgtactttactcatttttttttcctcacatattatcaaaagtaatcacaatgtgatttgttttgacgaatactggcaccgtttgttcaggattgcaatcctgaaatttgcccttcatgagggggatcgtggagggtaaaaagagggggaggctgacgttatgacatgagttaggttttatttcattgatttaaatatactatttcacagtttgtagaaatgagaattaatacgatggcggattgtgtgattatttgcggcgtgcgtcacatttaatcaaatataatcttgttgtgattatttttgattattagagtgatcgcaacaaccagcctgggcgtagcgtgcgttcagagcgtccaccttctggagtgtgttatggagattctctaccacatctttaccgtgttctttaaccaggttatgaccaacgccccgctgctgctgggtattgtgacctgcctgggctatatcctgctgcgcaaaagcgccagcgttattgttaaagggacgattaaaaccattatcggttttatgctgctgcaggccggctccggcattctgaccagcacgtttaagccggtcgtggcgaaaatgtctgaggtttacggcattaacggcgctatctccgatacctacgcgtcaatgatggccacgatcgaacgcatgggcgacgcctacagctgggtgggctatgccgtactgttagccctggcgctgaatatctgttatgtcctgctgcggcgtattaccggtattcgcaccatcatgctgaccgggcacatcatgttccagcaggcggggctgattgccgtctctttttacatcttcggctacccgatgtggacgaccatcatctgtacggcggtactggtgtcgctctattggggcattacctcgaacatgatgtataagccgactcaggaagtgaccgacggctgcggcttctccatcggacaccagcagcagttcgcttcatggattgcttacaaggtcgccccgtatctgggcaaaaaagaggagagcgttgaggatcttaagctgccgggctggctgaacatctttcacgacaacatcgtctccacggccatcgtgatgaccattttcttcggcgcgattctgctctccttcggcatcgacaccgtacaggcgatggcgggtaacacccactggacggtctatatcctgcaaacgggcttctcgttcgccgtcgctattttcattatcacccagggcgtgcgcatgttcgtcgccgaactttccgaggcgttcaacggtatctcccagcgcctgattcccggcgccgtactggccattgactgtgcggcgatctatagctttgcgccaaacgccgtcgtctggggctttatgtggggcaccatcggtcagctgatcgccgtcggtattctggtcggcttcggctcttccattctgattattccgggctttatcccgatgtttttctcgaacgccaccatcggcgtctttgctaaccactttggcggctggcgcgcggcgctcaagatttgtctggtgatgggcatgatcgaaatctttggctgcgtctgggcggtgaagctgaccggcatgagcgcctggatgggcatggcggactggtcaattctggcgccgccgatgatgcagggcttcgcctccatcggtatcgcgtttatggccgtcattatcattatcgcactggcttatatgttcttcgcagggcgcacgctgcgcgctgaagaggacgcggaaaaacaactggcagatgcttctgctcaataaggagttttgactatgaccgtacgtattctggctgtatgtggcaacgggcaaggcagttccatgatcatgaagatgaaggtggaccagtttttgacccagtcaaatatcgatcacacggtaaacagctgcgcggtgggggaatacaaaagtgaactcaacggcgcggacatcatcatcgcctccacccatatcgccggtgagattagcgtctccggcaacaaatacgtggttggcgtgcgcaacatgctctcgcctgcggattttggcccaaaactgctggaggtgatcaaagcgcacttcccgcaggatgtgaagtaaggacgccaaatgaaattacgtgattcgctggtggagaacaactccatccttttacaggccgacgccagcacctggcaggaagccgtcaagctgagcgtggatttactggtgaaggcggatgtcgtggagccgcgctactaccaggccattctggatggcgttgctcagcacggcccttattttgtgattgctcccggtctggcgatgccgcacggtcggccggaagagggggtgaagaaaacgggctttgcgctggttacgctgaaaacgccgctggttttcaatcatgaggataacgacccggtcgacatcctgatcaccatggcggccgtggatgccaatacccatcaggaagtcggcatcatgcagatcgtcaacctgtttgaagatgaagccaattttgaccgtttacgcgcctgccgctccgcgcaggaagttctggaattaattgataacgctacggcagcggccgtttaaaaggaacaccaaaatgtcattacctatgttgcaggttgcgctcgataaccaatctatgtcttccgcgtatgaaacgacgcgcctgattgccgatgaagtggacattattgaagtcggtaccattctctgcgtggctgagggcgtacgcgccgttcgcgacctgaaggcgctctatcccaacaaaatcgtgctggcggacgccaaaatcgccgatgccggtaaaattctctcccgcatgtgctttgaagccaacgctgactgggtcaccgtgatctgctgcgcggacatcaacaccaccaaaggcgcgctggacgtggcgaaagagttcaacggcgacgtccagatcgaactgaccggctactggacctgggagcaggcgcaggagtggcgtgaagcgggagttcagcaggtggtttatcaccgcagccgcgatgcccaggccgccggcgtagcgtggggcgaggcggatatcagcgcgatcaaacgcctgtccgggatgggctttaaagtcaccgtcaccggcggcctggcgctggaggatttgccgctgttccaggggattccgatccacgtctttatcgccggtcgcagcattcgtgacgccgcttccccggtggaagccgcgcggcagtttaaacgttcgatcgcccagctgtggggctaaggagcggctatgctgtcgaaacctattccgctcggcatctatgaaaaagcgctccccgccggggagtgctggctggaacgtctgcggctggctaaggcgctcggttttgatttcgtcgaaatgtcggtcgatgaaactgacgaccgcctggcccggctcgactggagccgggagcagcgcttcgcgctggttaacgcgattgcggaaaccggggtgcgcgtgccctcaatgtgcctgagcgcccatcggcgcttcccgctcggtagcgaagacgacgcggtacgggcgcagggcctggagattatgcgcaaagcgattcggctggcgcaggatgtggggattcgcgtaatccagctggcgggctacgacgtctactaccaggaagccaataacgagacgcgccgtcgtttccgcgatgggctaaaagagagcgttgaaatggccagccgcgcgcaggtaacgctggcgatggaaattatggactacccgctgatgaactcgatcagcaaggcgctgggctacgcccactacctgaataatccgtggttccagctctatccggacatcggcaacctttccgcctgggataatgacgtacagatggagcttcaggccgggatggggcatatcgtggcggtgcacataaaagacacgaaacccggcgtatttaaaaacgtgccgttcggcgaaggcgtcgtcgattttgaacgttgtttcgaaacgctcaagcagacgggctactgcggcccgtatctaattgaaatgtggagcgaaacgaccgacgatccggccgccgaggtcgcgaaagcgcgcgattgggtgaaggcgcggatggccagcgccggtctgctggaggtggcataatgcaaacgctgaaacggcaggttttcgacgccaatatggatttaccgcgctacggcctggtcacttttacctggggtaacgtcagcgctatcgaccgcgaacgcgggctggtggcgattaagcccagcggcgtcgcctacgagaccatgaaagcggacgatatggtggtcgtggatctcgaggggaacgtggtggaaggacgctatcgtccttcttccgataccgccacgcatctggcgctgtatcgccgctatccgagccttggcggcgtggtgcatacccactcgacgcacgcgacggcctgggcgcaggcgggtctggccattcccgcgctggggacgacccacgcggactacttctttggcgacattccctgcacccgggcgttaagcgcgcaggaagtggcggaggcttatgagctgaacacgggccacgtgattatcgaaacgctgggtgacgttgagccgctgcatacgccgggcatcgtggtctatcagcatgggccttttgcctggggcaaggatgcacacgatgcggtgcataacgcggtggtgatggaagaagtggcgcggatggcgtggattgctcgcgcgatcaacccgcagctgaagcccatcgatagctggctgatggacaaacattttatgcgcaagcacgggccagatgcctattacgggcaaaagtgaaacaggtgctccggagcatttcatctttatgatgaatcaaccggtctgctccggagccatttttagttttgctgataagccgacggcatgcagcgcataccaaccagcgtcacaacgcagattatcgcgccggcgtaaaacgtcgaggcggcgcccagaacttcccacagcacgcccgcacctgcgctggccagcagcagggcgatgccgctcattaggttgaacatcccgaacgctgttccgcgcagttcaggcggggcggtgtgcgccaccatcgccgccagcagaccctgcgtcatgcccatatgaataccccacagcgcgacgccggctaaaagcgtgctccagtggctgctgagcgccagcacgatatcggcggcgatcagcaccagcaggccccactgcagcattttgctgtggctcatgctgtccgatagtttcccgaatggataggcggtcaggctgtaaaccagattcatggcgaccatcaccagcggaatagcgaacagcgggatcgccatctgctgggcgcgcaggaccagaaaggcttcactgaagcgggcgagggtaaaaatcgagccgatagccaccacccaccagtaggcggcggaaagcttcttgagattctcgcggcgcagggggttagtgcgtttctggacgaccgccgtcctgggctcttttaatccaaagcccagtaaagcgatagagagaatggcggggatcgccgcgacccaaaaaatagactggaaatcgttatcccagagaaacatcagcgcgacggcaagcagcggccccagaaaagcgccgatggtatccagcgactggcgcagcccgtaggcggctccgcgaatttccggcggtgtgacgtcggcgaccagcgcatcccgcggcgcgccgcgtatccctttgcccacgcggtcgatcatccgggcgctaaacactacgcctgaggtgggcgcgatggcgaaaagaggcttgctcagcgcacccaggccatagccgagcagcgccagccctttacgtttgccgacataatcgctgatgacgccggaaaacaccttcagtatcagcgcggtggcttccgcgacgccttcgataatgccgataacaatgacgctggctcccagcgtggtggccataaatagagggagcaggctgtggatcatttccgaggaaacatccatcagcaggctaacgccgccaagaacccaaaccccttttgggatacggcttagcgtggcaaaacgcggaaccatgaagcactccggataatcatgcggttaaagagtgattaaatcaggttacgctggcgctgataagtcacgagaaaaaataattctcaattgcattaaggcgcgattgtgcgggtatgaccgccgggcaatgccatcgttggcttccccctgcaacgggaagaagccaacgatccgggaaaactagcggtaaatggcggcactggcgtgaatggcgccgtcgcttcccggttcatgaatgaggatcggctggaagtacttcgctccctgagcatcgctctgctggctaagcgcctggtcggcttcctgctcggtggcgatgttgtggttgatatagataacgccgaggctctgcacatcgtccatgttgcgggcctggcgggcatcgattttaatagcagccagcgcgttggcgctcaacaaaagcgctgccatcatggttatgaggatgtatttcatcacctacctccttatgacgctcctgacgttcacccgcttccctggggtatggattgcttctgatctaagtgtaatctctgcctgtctggcgtatcgcgaccatttctgatgcagttgttcaaaaaattgtcgcttccgtcgttgattaattttaaatcactggcttaaggccacttcgcgcttagtgcgaattatttgcacaatttacttgtcttaaaccccgctcgcccgtattatgacgcgtcaatttttcagccgccctttaacacgttccttgcctccatgggccgcggctgacccagacaggaggctgaataatccgtaaggagcaattcgatgcgtcattacgaaatcgtttttatggtccatcctgaccagagcgaacaggttccgggcatgatcgaacgttacactggtgcaatcactgcagcagaaggtacgatccaccgtctggaagactggggccgccgtcagctggcttatccgatcaacaaactgcacaaagctcactacgttctgctgaacgttgaagcgccgcaggaagcgatcgatgagctggaaactaacttccgcttcaacgacgccgttatccgcagcatggtaatgcgtactaagcacgctgttaccgaagcatctccgatggttaaagcgaaagacgagcgccgtgagcgtcgcgaagatttcgccaacgaaaccgcagatgattctgaagctggggattctgaagagtaatcctgatgaccaaccgtctggagctgtccggcattgtatgcaggactccacttcgtaaggtcagcccgtcaggaattccacactgccagttcgtgcttgagcatcgttcagtgcaggaggaagccggttttcaccggcaggcatggtgccagatgcccgtgataattagcggacaccagaaccaggccattactcacagtataacggtcggtagcgcagtaatcgttcgagggttcatctcttgccacaaggcaaagaacggcttgagcaaaatggttctgcatgccgagcagattgaattgatagattctggagactagccatatggcacgttatttccgtcgtcgcaagttctgccgtttcaccgcggaaggcgttcaagagatcgactataaagatatcgctacgctgaaaaactacatcaccgaaagcggtaagattgtcccgagccgtatcaccggtacccgtgcaaaatatcagcgtcagctggcacgcgctatcaaacgcgctcgctacctgtccctgctgccgtacactgatcgtcatcagtaatcggtcacggtccattaatacgactttgagaggataaggtaatgcaagttattctgcttgataaagtagcaaacctgggtagcctgggtgatcaggttaacgttaaagcgggctatgctcgtaacttcctggtaccacagggtaaagctgttcctgctaccaagaaaaacgttgaattcttcgaagcacgccgtgctgaactggaagccaaactggccgaagttctgggcgctgctaacgcacgtgctgaagcaatcaacgcactgggcaccgttaccatcgcgtctaaatctggcgacgaaggtaaactgttcggttccatcggtactcgcgacatcgctgacgctgtaactgcagctggcgttgccgttgctaagagcgaagttcgtctgccgaacggcgttctgcgcaccaccggtgagcacgaagtggacttccaggttcacagcgaagttttcgctaaactggttgttaacgttgtagctgagtaattttttactcaactcacgtcgagacgccggccttgtgccggcgttttgcttttctgtctttgtcgaatcttttcctggtatggtggctattcttagcaactttctggataataaaataaaacactattttatttctggtgaagtgaatggacgcaccctcgattttttcccgcaagaaagtggcttatgcctgcgcaaccctctgctgtctgctgtggggaagctcctatccggcgattaaaagcggctatgaactgtttcagattgccactgatgatgtgccgtctaaaatcgtctttgctggctatcgctttctgtttgccggcgcgctgctgctgctcttcgcgctggcgcagcgtaagccgattgcccgcttgaatccccgtcagtgcgggcagctggcgatactgggcgtcacgcaaacctctatccagtatgttttcttctacgttggcctggcgtttaccaccggcgtgaagggatcgattatgaacgccaccggtaccttcttcagcgttctgctggcgcactttatctatcagaatgacaggctgagctacaacaaagccatcggctgtattgtcggctttgccggcgtgatgctggtgaacgttaatcgttcattgagcgattttagctttgtctggcagggtgacggctttgtggtgctggcggcgtttatcctgtcggcggcgacgctgtacgggaagcgcatttcgcagacggttgacccgacggtgatgaccggctggcagctggcgtttggcggtctggtactggtcggcggcggctatctgaccggcggcacccttgaggttcacagcgccgctgctgcgctggttctggcttatttgacgctgctctcttccatcgcttttgcgctatggagcgtgctgctcaagcataaccgggtgagcatgattgcgccgttcaactttgtggtcccggtcgccggcaccgtactgtcggccatcttcctcggcgagaatattcttgaactgaaatatgcggttgcgctggcgctggtgtgcgccgggatctggtgggtgaataagccggggacaacatccgggaaatcgccacagcaggccgggtaagctacccggccgtgaggcctaacggacgcgaataaagctgccgttcgactggcgggtaaacagcacctgctggccgccgccggtatcgatagtcaacccggtgaccacgccgctggcgttctgacggatctgtaccgtctgcccggtctgcagtgagcttagcggtttaccggcgccttccacctgggccatggcgtaaacgtcagtcggcggcaggttgtggtcgcggaacagctgcgcgagagttttccccgattcaatacggtaggtccgccactgctgctcgatgccgggagtcgactgcggctcctgataaggctgagatgcggtctgctgctgcggctgatccggctgctcatcctgaatcggctccggtgcgaccggcgccacctgatcggcatcgttgaccggcggcgtgttggtgatgggcggcagcgggaccgcctgattgccggaagagggctgcgactgggattgcaggttgagattcgcctcgcggctggcctgaaccgggctgctgttatcctcggaagggagcagaacgccgataattaccagcagcgccccggcaatgatgccgcggcggtgcatcggcggtagcggatccatgaggcgaaaatgatccggggcgtgccagatcttcgccagggtagatgtcagttcaaagcgcccgggcatggctttcctcctgctccgcatatttttatcctgctctctctagagtatagatggctaacttcctgaaggacgagacaaagctatgtttcgtgaggttaaccttatctctctattgtttctgtttcccttagatttgtcatcatccaggcgacaaagttttacccgtcgtgctatggctgatatgcttcccacctcttttctccgctcgccgcctttcgcaatttgaaggcccgggagcatgagaatcccaccaaaaaaggaacaaagatggcaaccccaacttttgacacgatcgaagcacaggcaagttacggtatcggcttgcaggttggacaacagctgagcgaatctggcctgcaggggctgctgccggaagcgctggtcgcgggtattgctgacgcgctggaaggtcaacagccgcaggtgccggtggaagccgttcaccgcgcgctgcgcgaaatccacgaacgcgctgacgccgtgcgtcgcgagcgtttccaggaaatggccgcggatggcgagaaatacctggaagaaaaccgcgagcgcgaaggcgtgaacagcaccgagtctggcctgcagttccgcgttctgacccagggcgaaggcccgatcccggcgcgtactgaccgcgttcgcgttcactacaccggcaagctgatcgacggcaccgtcttcgatagctccgttgcgcgcggcgaaccggctgaattcccggtgaccggagtgatcggcggctggattgaagcgctgaccctgatgccggtgggttccaaatgggaactgacgattccgcacagcctggcctacggcgagcgcggcgcgggcgcatccattcctccgttcagcaccctgatttttgaagttgaactgctggatattatctaaacagcaggtgcttcctctcccgtacgggggagggggccgctttaaatagtgtaaaacccttaagttgagcgtttggtggagctttatattgcatatctgcttgatgggtgtatttttgtgagctgtttcgcgtaaccggagtgatataacactcactttaaacatataattaacattatatctaaatcatagtattcatccctccgattcttacctaatatcgataaaccctcgttccggggttaatacgaatgaagggccagtagagcccgaacaacacagacaggtacaacaggaaaaaatcacatggtagatcaggtaaaagtcgctgccgacgaacaggctccgactgaacaatcgctgcggcgaaatctcactaaccggcatattcagcttattgctatcggtggtgcgattggcaccgggctgtttatgggctcaggcaaaaccatcagccttgccgggccgtcaattatttttgtttatatgatcatcggctttatgctgtttttcgtcatgcgcgccatgggcgaactgctgctatcgaatctcgaatacaagtcgttcagcgattttgccgccgacctgctgggcccctgggcaggctattttaccggctggacctactggttctgctgggtggtaaccgggatggcggacgtggtggcgatcaccgcctacgcgcagttctggttcccgggactctctgactgggtcgcctcgctggcggtcatcctgctgctgctgggccttaacctcgccaccgtgaagatgttcggcgagatggagttctggtttgcgatgatcaaaatcgtcgctatcgtggcgctgattgtcgtcggcctggtgatggtgatgatgcacttccagtcaccgaccggcgtagaagcctctttcgcccatctgtggaatgacggcggctggttcccgaaaggcatcagcggattctttgccggcttccagatagcggtcttcgcctttgtgggcatcgaactggtgggaaccacggcggcggaaacgaaagatcctgagaaatccctgccgcgggcgattaactcgattcccattcgtattattatgttctacgtctttgcgctgatcgtgattatgtcagtgacgccgtggagctccgtcgtgccgtcaaagagcccgttcgttgagctgtttgtgctggtcgggctgccggcggcggcaagcctgatcaacttcgtggtgctgacctcggcggcctcttccgctaacagcggcgtgttctccaccagccgtatgctgttcggtctggcgcaggacggacaggcgccgaaaatgttcgccaagctgtcgaagcgcgcggtaccggcgaaaggcctgaccttctcctgtatgtgtctgctgggcggcgtggtcatgctgatggtcaatccaagcgtgatcgcggcgtttaccatgattaccacggtgtcggcgatcctgtttatgttcgtctggacgattatcctgtgctcgtatctggcctaccgcagaaagcgtccgcagctgcatgagcagtccaaatataagatgccgctgggcaaactgatgtgctgggtgtgcatggcattcttcgtctttgtgctggtcctgctgacgctggaagccgatacccgcgaagcgctgatggtgaccccgctgtggtttgtgctgctcggcgcgggctggctgtttgccggcaagaagcgcctggcgaaataaaaaatcttcggcagcggtttttaacgttgcttgcaacggtccgtcataaaaaaggccacccggggtggccaataagactgacaatgtcgagggcgcctgcgggcgcctttttatttactttccggcgagggcacgcgggaacagtacgttattttcaaggctgatgtgctccatcaggtcatcaatcagctcgttgatgccgttgtacatcgctttccatgtagtgcaggcttccgccggcggcgtcacgttctgcgtgatgtgcttaatcacctccagcagctcgcccgcttcatcatgctcgctttccatgacgctgataggaccgccggcctgcgttcccatgccctgtttgatcatcgggaacagaatctgctcctctttcatcatatggctggaaagctcctggtgcagcatggtcaggtacttggttaagcctttcggaacgttgggcttgtcggcgtgaacgcgctcgactttagtggcctgtaaaatcagctccggcagctgctcgcgatgccggtcgtgatagcgaacgataatgtgatcgatgatttccgcatagggcgcagcccgccagtcgcgctctaccggctcttccgccagtttggccagctcggcttcaatcaccgcgacgtccagctctttgcgagacgccgcgcgctctagcgtctgtttgccgccgcagcagtagtccatatcgtattgacggaacagcgcggaggcgcgcggaatcgtcagcgccagctcgcctaaaggttggtcacggaaagccatagcagttacctcgtcatcaagaatataagttgtattttaaatgcatcttatgttcctgggaatacccctttaggataccaggctattttttctcgctgaccagctcctgcagcgcgggcttttccgggcgggcacgcacggcggacaccacgccgagcaccagcagcaggataccgctgaaggtgagaagcgggggcaggctctggcgcagaataaaggtatacagcagtccggcaagggtttcgaagacgatcagcggcccgaggatcaccgttggcagacgctggctggcaacgttccagcaccacgcgccgacccatgaacagaaaatagcgatcgccagcatcagggtgacaaacaccgccgggcgcgggccgaaggggagcggaaagtccgcgtgctggccgtgcagccacccgcaggcgataaggtatccggccagggataccggcagggtcaccagcgcctgcgcggtggcccacatcatcggcggtttatccggattttcccgcagccagcgggcgttgcgcagcgcgtaccaggcccagcacaccaccgagatcagcgccagcgcgataccggagccgtagcgccacgggctgaaatcgggtaagccctgatgcagctcggcgatattgacgcacgtcaggccgagggcaatacagaccagcgccgggaacaggcgtcgccacggcagcttaccgtcgcgctggctatagagcaggttggcgaaaaccggcagcacaaccggcagggtgccgataatcatcgtcgataccggcgcgccggtacgctgaatcgcgctggccaggcagacgtaatagattaagttgcccatcatggtcagccccagcgccgtccaccagtctttcccggtgagctggcgcagccgcgcgcggcccagccaggccagcggcagggcgatcagccccagcgccagatagcgccccatcgactgtaaaaccgccgggtattccggcaccagtaaaggacccacgaatatcaatccccacatcagccctgccagcagggcgtacagcacaccactaatcatcacgccttccattactcttttcgttggcaacagtgtaggcgagccaaaagcgggaatattgtatgaggttgcgcattagcgcgggagaacctgcttttgataacgcaccggcgtaatgccgtagcggcgggtgaacgcgcgggtcaggtgcgactggtcggtcagcccggcggcgagagcgacgtcggcggcgggcatgccgtgggtgagaaacgctttagcgcgccacaggcgaatcgccatcagcatctggtgcggcgtaacgtggaagtgcgctttgaactggcgctggaaatggtacgggctcagcgccgccacctgcgccagctcatcgagggtcaccgtacgcatatagttatcgtgcagatagtcgcgcacccgctcgaagcggtggcgggcttcgggcagcgcagcggcgtgatgggcaaacgggcggaaggtatcgatcaaatccagcagcagaccctgctgcgccagcggatcgtcagtatgccacaggccgtagatgagattgccgatttgccgggagcgcaggggatcctgacgcaccacctcgctgaaccaccagtggcgcacgccggtcacctcttccagcgtatccgggtcgagataaatcatccgatagcgccagccgtcggcggtctccgcctcgccggtgtgcagttcatcgggattcatggtgacgatagagttgaccgaagccacgtgctggctgccgcgatagcgaaaacgctcggcgccgagctctatcgcgccgataccaaaggcttcatgggtgtgcggttcaaaggcgtagcgggagatatgggcatggtacagctcaacgccgggcagctgcgccagatggcgaaagcgcgcgctgtctctttcatcattaaactgttccggtacgccttgcatgcgataactcccgacggacatccgtacattattgaggatggcccgccgggatgctacaaaaattaaccactatgtaacagttacagaatgcctttgacgctctctgccagcgtcgtggttgggcgaccgatgagcttactcagggtgcggctatcgtcgaacagaccgcctttggacgcgccggtatcagaatccgccagcatgtcagccaggccagcgggcaggcctacgcccttcagcgcggcggcgaagtcggcttcgctgaggttttgatacaccacgtttttaccgctttgtttgctcagctcagcggcaagttcgctgagggtccacgcttcatcgcccgccagctcgtacacttttccggcatggccctcttcggcgataacgcgagcggcggcggcggcgtagtccgcgcgggtggcggaggcgattttgccgttaccggccgcgccgataaatacgccatgctcaatcgacggcggcgcgctggcaaggtagttttcggtgtaccagccgttgcgcagcagggcatacgcaatgccggagtcggcgagcattttctcggtggcgatatgctcatccgccagccccagcggggaggtatcggcgtgcagcaggctggtgtaggcgataaatttcacgccggcggctttcgccgcgttaatcacgttgcggtgctggacggcgcgctggccaacttcgctggacgagatcagcagcagtttgtccacgccctgcagggcggcggtcagcgcggcttcatcgctgtagtcggcctgacgaaccactacgcccttttggctcagcgattcagccttcgccgggttgcgcacgatagccacaacctggcctgcggggacggtagttaacagattttccaggacgtgctggccaagctggccggttgcgccggtaattgcgatcataggtcttctccttcgtgttcattggcagttgtggtaagctaacaccttaactaacttttagtaagtacgtacaaaaaggtaagtatgaatatggcgaatctgacgctgagcgagcagctacgcaacggcaacctgtttgccgaacagtgcccctcgcgggaagtgctcaagcacgtgaccagccgctggggcgtactgattttggtgtccctgcgcgatggcacccatcggtttagcgatctgcggcgtaagatcggcggcgtcagcgaaaagatgctggcccagtcgctccaggcgctggagcaggatggctttcttaaccgcgtgtcgtacccggtggtaccgccgcacgttgaatatagtctgactccgctcggtgagcaggtgagcgagaaggtggcggcgctggcggactggattgagctgaacctgcccgcggttctggcgaaccacgaacaggtagcctgaggaggatgtcaggatagccccggtaagcgcagcacaaccggggaaccggcaattatttactcaaatccagctgataaatggcaaagccgatatcgtcggtagccacctggcgcatcgggtattgcgctttctctttgataaacgccgcggccttatcgcccggtgaggtttcaaagcgaatatccagcggtacggtgctgtggatcggcgccaggcgccagttgttatccgccgccggatggatctcgccgtttttcttcgactccgcgccaatccacgccgccagcaccgagcggttttcatccggcgaggcgaacgcgatatgatcctcgccggtgccctggaatttaccgccgtaagcgcggtagttattggtcgcgacgaggaaagtggctttcggatcgattggcttgccgttaaaggtcaggtttttaattcgctcggcctgcggattaacgggctgacattcgccgtcatagcgcgccggctgggtgatatcgatctggtagttcacgccatcgatgacatcgaagttgtaggtgcgaaagccgtcccagttaatcagcgactgcggcttactgctgccggggtcaatctgattgaactgcccggcggagcactccagccactctttaacctctttaccgctgactttcatcaccaccagggtgttgggatacaggtagaggtcggcggcgttgcggaaggtgagctgccctttttccacttcaacaaagctggcggggtcatttttgcgtccgccgactttaaacggcgcggcggcggagagtaccggtagtttcgccagatccgggtcgccctgaatatagtgctcaacgtaagccttctgggccatattgaccacctgcacggtcggatcgtcctgcaccagcgccagatagctgtacatattgtccgaggattgaccaatcggtttgccgacaaactcgcgggtggcgtcatggtcggcttttagtaccgccaccatgttgctgtcttctgccgccagcgatttcttcgccaccgagtcgtagatcgggcgcgcttcggctttcgctgcgctgacctgccatttaccgctgtcgttgttcagaaccagatcgaccaccccaaggtgatcgccccacatgcccggcattacagccggtacgccgttcagcgtacctttcgcgatatctgcgcctttgataccggcaaaatctttgctcgggaagacggcgtgcgcgtggccgaacataatggcatcgaccccaggcacctggcttaaatagtaaacggagttctccgccatcgcctgatacgggtcggcggaaaggccggagtgggcaatgaccaccaccacgtccgcgcctttctcacgcatttccgggataaacttgcgcgcggtggcggtaatgtcgttgacggtgactttgccgctgagattggctttatcccaggtcataatctgcggcggtacgaagccgatatagccaatgcgcagggtctgcgttttgccgtcgctatcctgtacctgggtatcctgaatcagataaggcgtaaacatcggttggccggttttggcgtcaataatattggcgttcacgtaggggaattttgccccggccagcgctttgtgcaggaagtcgagcccgtagttaaactcgtggttgccgaggttacctacgacataatccagggtattcatcgccttgtagaccgggtgaacatcaccttctttcagtcccttcgccgccatatagtcgcccagcgggctgccctgaataacgtcgccgttatcgaccagcacgctgtttttggcttcctggcgcgctttctcaatcagggttgcggtgcgcaccaggccaaatttttccgtggcgctgtctttgtaatagtcaaagtccatcatattactgtgcagatcggtggtttccatgatccgcaaatcgaccgtcgccgcatttacgctggcggcgatcagcgtggccagcagcgttgcgctaaacttaatcatcagtggcgtccttttttatgagcaatagcacagaagaaaatgtatttacattctgttgcttacagaaatgtgaatcatgccagaaaagcggtgaaggaaaccgccatcgttatcacagatagcggaactcacaatgatgcgatataaataaaacaacgagttaacgccactgtaaccagacgaggtggagaatgttagaacaagtatgtcagctagcacggaacgcgggcgatgccatcatggaagtttacgatggaaaacagccgatggacgttgccagcaagaaggacgattctccggtcacggccgcggatattgcggcgcacaaggtgattatcagcggcctgctggcgctgacgcccgatattccggttctgtcggaagaggacccgccggcctgggaggtgcgccagcactggcagcgctactggctggtggacccgctggacggcaccaaagaatttatcaagcgcaacggcgagtttaccgtcaatatcgccttgattgaaaaagggaagccgatccttggcgtggtctacgcgccggtgatgaaggtgatgtacagcgcggaaaagggcaaagcgtggaaagaggagtgcggcgttcgcaagcagattcaggtccgcgatgcgcgtccgccgctggtggtgattagccgctcccacggcaatgacccggagctgcaggagtatctggagcagcttggcgaacaccagaccacctcaatcggttcgtcgctgaagttctgtctggtcgccgaagggcaggcccagctttatccgcgcttcgggccgacctccacctgggacaccgcggccggtcatgcggtcgccagcgccgccggggcgcacgttcacgactggcaggggcgtacccttgattacacgccgcgtgaatcgttcctcaaccccggcttccgggtctctatttattgagcagcttgtgcagcagggcaaccacctgctgcacctcttcctggctaagcgcgccgtctttagcccactgtacgcggccgtctttatccagcaccacgatggccgaactctcttcattaagctgccacgctttgcggaccacaccgttgctgtcgacgataaactgcgaccaggggtagagctgcttgttgctctcaatactgctgcggacaaacatgcctgaacccgggatagcgtcatcggtattgacgatagtggtggtttgatagcgatcgtgcgggagcttcgcgcttttaatcgcttcaatcagggtcgcgtttttttcttttgccgacgagcgcccggcaatatgctgcacgacgcgcactttccccaccagctgcgcgctattccagcttttatagctaaacttatcgttgttcagtaccagctccccccgctccgcgacgccgaccggcgcaacgcgctgaccatcgacaaagttatgcgccgacgccatcagcgggaacaggagacatgaaacggccagtaatctacgtagggtcatggtgtttccttttattatctgtgcaggtgatccgaccacttggtctgctttaatcataagtgcgatttatgggcattacccgcaatgatggtgccagtttgcgtgttgacgcacaattccgtctaaaatcggcgacttatactaccttcatcggatgcctgaaacgaaaactctgaattattgtcatcataaggtaaataaacttatacaaactgggtatcactcagattctggactatagtttcagggcattaaaatttgcgattccggtacgtgggctaactgtggcaccacaggagcgtaaccctggcaggagacaacaatgaaaattttccaacgctacaacccgctacaagtagcgaagtacgtgaagatcctgttccgtggacgtttgtatatcaaggacgttggcgcttttgagtttgataagggcaaaatccttatcccgaaggttaaggacaagctgcatttgtcagtgatgtctgaagtcaaccgtcaggtgagccgtctgcaaacagagatggcatagcctgaaaagaggtatgactacacggtaaaaaggcggctccctaagggagccgttgatgtttctggacctatcccttcatttccgcatagcgtttacggtactcgcccgggggaatgccgttatgtttacggaaaatgcgcgtgaaatagaccgggtctccgtaacctaccgacagggcgatcttgttaagcggcagggaggtgctctggatcagccacctcgcgcggttgatgcgctgcgcctcgcgccaggcgtaaaccgtttgccccagctcatttttgaacaaatgcgccagccgcgaaggggagagaaaaaccatcgccgccagggtctcgatcttcatctcctgggcaatatgttcgttaagatagtcgcacacggcgttaatccgcgggtcgtgggcgtggcggttgctgatcggctgtcgctgaaagcagttcaggatcaggcgctccagcgcattcatcgccagcgcctccgacagcggggcggaagcggagtagtggcggataacttcatagaacagatcgcgcagactctgcagctgctcaggatcgttgaccgtggttttaccaatgccgtgggtcgtttgatcccattttagccagtctatccagtagggccgggggatgaagtagatccataaatgatcccagtattcgctgtgttcgtcccgtccgtaatggtggggaacgccgggcgggaagagcagcagatcgttttcacgacacagaagggagccgtctcccgctttcgcgcgcgcctggccgcgcagcgtcagattgatgatgtaacctttcatcccctgcgggcggtttatgtagtagtccagctttgagccgcgggtgatgggggtaaagccggcgacgacccaggcgttgaaggtaaaggtcttcatcaatggcgagaagttcagtagctcattgatatccagttccatcgtttctcccgcccgagcgccgccgcccgcttaactttcgatgatagtaaattcccatgctttgaggcgcaacggctggccgcagctaactttttccccgctcaacagcgcgttgcccgatgtctcgctgataaacgcctgcggttcgccggagtagttgaacaggaagtggatgctgttgccgtcgcggttgcgcatctttttgaccaccagcggatagcggtaggccgatgtacgtgaacgcagatccagtcctgcggtcagccgatcgaacagctggctaatcagcgttttctgcggcaggaagccaacgtaaatggcccgaccctgagcgtaatccgcctcggtggcggcggcatagtcgccccatgccggatgctgatagcgcagtagcgtacgggtaccggcgtccggcgtcagcagctccatccacagctcggcctgattgtcttgacggcaatcaatgtccgcgctgcaggcgcgtaccgtggtttcttccggcagggtgaattgactgtagctcacgccgcagctctcgcgcaaaattcccggctgcgcgccgctgcgcaccttcacgttttcatcgctaaagcccgatttaaagccgatcagcgctctgccgccctgttcgatatagcggttgatgcgcgtcagcaggccatcatcggcggcgtagagtccgggtacgatcagcgcgcggtagcgcgcggtttcctcgttaacgtcgtggataatatcgaggctgatattgtggtcgtacagcgcatcgtggaagcggcggaaaatatcgttataaatattgccctgcgcgtcgccggggcggaactggttaagggcgtccatcgcctcattgcttatcagcagcgcgacgtcgttttctgccttcagctccgccagctgcggcgacaggcgggcaaagtcagccccgatagtggtggcctcctgccaggtcgcgttgcgcgagaagtcgtggcttaacagccccttccagtaggtctcgaacgcgttatgaatcgaatgccagtgccagtaagagaccattgccgcccccgatgccacgtggctaaaagcctgcaggcgcagctggcccggataaggtgtccactgggcaaagccctgcgcctgggtttccagcacgaagtaattcttaccctgctttagcgaacgcgtaatggcgccgccaaacgcgatttctcgcccggtcaggtgtttctggctcgggtgatagatatcgacaccggcaatatccagcgtctgcgccgccgcaaaatggtcaactcgcggctgcacgccgtaggagtagccgcgccattcaaaatcgaagttgtgggtgacgaactgatgcggctgggcatattcgcgcacgatctccgcctgccaggcgagatactccgtcacctgctggcgctggtagcgggagaacgcgcaggcgaggctggcgttgatagtgttttcgaccggcggaaaatcctgccagctatcgatgcggttgctccagtagtccagaccaaaatcgttattcaaccggtcaagatcggggtatttttcccgcaggctgcgtacaaaaccctcctgcatatggcggccgatattatcgtaatgcttggtttcgttatccagctgccagccaataatcgccggatggtgctgcacgtgcgccattagcgtacggataatcttttcggcatagcggcgaaaggtcgggttgacgatatccataatctggcgcgggccatatttttgctgcccgttgacggtagtgaccaggatatccgggtgcttcgccgccagccaggccgggacggcgtaggttggcgtgccgataatcaccgcgatccccgctttatgcatggcattcagcacccggtcgatatggtagaagttatattcgccctcccggggctccagcgtactccaggtcgattcggcaatccgcaccacgttaatgcccgtttcctgcattaaggcgatatctttcgccagccgatcttccggcatatattcatcgtaataggccacgccataaaataaatcagacatacaggttacctccttaaattaatgcgcgggcgccggctgcggggcaaaagcgcgcgctttgtccagcgtaataaatgaaatcagggtaaagcacagggcgataccgccgagcacgatatagctgctggtaaagcccatgctctggtacatgtgaccgatgccggtagaaaggaaaatagagctaaagcttttcgaaaactggaagccgattaaataaaccgtggccgaaagcagcgggttgaagttggccgtaatatatttcagcgcggcgacgagtaataccgagctctcaaaaccgtgcagcagtttaatcaggctaatggacaccggaccgatagcccaggccgagccgataatgcgcagactcatgatcattccgcagtacagcagagcatttttcgggccgattttattcacgaaccatggggcgaaaaacatcacgaccgcatcaaggaaaatctgacctgtggttaaatagccgaagacttccgcgccgcgcgctttgctctcaaagaagtggctgtaatagatggcgaactgctggtcgtaggtttcatataccgcgccgacgccgatcgtgtagatcgcgaagaaccagaatttcttcattttcagcagcgaggtggcgtcgctcagggtgaccggcgaggctttactgctgtgtatcgcgccttgtttattcgcgctaatctgcattttccagacaatgaccagcaggcatacgccggcaccgctggccagccagaaaatcatgttctggtcgatcccgtagagcttgcctgccgcgaaggtgccgatagccgcgccaatgccgccaaacattctggcgcgaccaaactcaaaaccggaagcgcggctgactttatcaatgtaagcttcgcaaataccgcagcctgcgccataggccatgccaatatagatgccgcccgccagcgccccgagaaaaacgttaacttttaataatggcgcaaagacgtagatccagtagggggcaaagagggtaataatgatggccagcagccacatcaggtttttacgatagaccagcctgtcggatataaaaccgaatagtggttgaacgcaaacggcaataatcgcggtaaaggaataaaccagaccgacgtcagtgtaattaatgccgatggtttccgttaaccacaatgataaataaggatagcagcatccccagccaataaagaagaacaggaagaacagacagcttatatagtagtttttatttgattctatcatggtaaccctcgcttcctttattcaggaatatgatcgtgtagacgcgagcaaagttacctttttgcgcagaggggagtcatgaacgtttcgctgtggagcagtaaaaatctgctattgcccgaggggcgtgagcagcctcacattcgggcaataaaaaaggcggattttcatccgccttgtcggttcgtcaacggttttacgctgactctttatcgctgttggccgcatccggcagcttgggcaccagcaccgtcggcttattgtcgatacgggtcaccagcagctgatcgatgcggtagttgtcgatatccaccacttcgaacttatagccggagaatttcaccgcgtcggtgcgcttgggaattttacgcagcataaacatcataaagccgccgatggtctcgtagttgccggactgcgggaaatcatcgatatccagcacccgcatcacgtcgtcgatcggcgttccgccgtcaatgagccaggagttttcatcgcgcgcgacgatctgctcttccagcccctggccgacgaggtcacccatcagggtggtcatcacgtcgttcagggtgataatcccgaccaccagcgcatattcgttcatgatcacggcgaagtcttcaccggcggttttaaagctttccagcgcttcagacagcgtcagggtatccgggacaatcagcgtattgcgaatctgcacgccgccggtcagcaccagactctggtttgccagcacgcggttcagcaggtctttggagtcaacgtagccgatgatgtggtcgatatcttcattacagaccaggaacttggagtgcggatgctccgcgaccttattcttcaggctctgttcatcttcgtgaagatcgaaccagatgacgttttcacgcgaggtcatcgatgaaggcacggtgcgcgattccagttcgaatacgttctcaatcagctcatgctcctgcttacgcagcacccctgccagcgcgccggcttccaccacggcgtaaatatcatcggaggtaatgtcgtctttacgcaccatcggaattttgaacaggcggaagatattgttggccatgccgttaaacaaccacaccagcgggcggaagagaaacaggcagaagcgcatcgggttgatgatgcgtaaagcgacggcttcaggcgcgatcataccgatgcgtttcggagtcaggtcagcaaacagaatgaacaggctggtgaccagggtaaaggagataataaagctcagctgttcggagagctccggggacatatagcggctaaagaggccgtgaaacgccggcgaaaatgccgcatcgccgacgataccgccgagaatcgctaccgcgttgaggccgatttgcaccacggtaaagaacatcccggggttttcctgcatcttcagcacgcgttgagcgttgatgttgccgtcatcggccagcagcttgagtttgattttacgtgatgcggccagcgagatttccgatatcgaaaagaacgcactgacggctatcagacaaagtattactaaaatactgtttaacatatcttatctgaccgttgagatcagatcctcggaagggaagtggataacgctaagtggaattcacaaaaagccggtccgaaggctctggaccggcgatagcacggcgtagtatagcgtaaggtactgtaaagccgccagagcgtaaattattcaatccggcggcctgccctacggtgcagccgcatcaggcctgcggcggcaaacaaaccccaattccgccaatgccgcagtatccgtagggatttttatgcagatactgctgatgatcgtcttccgcatagtagaacggcttcgccgtcgcgatctcggttgtgatagtgcgcgggtcgttggcttcattcattgccgcctggaaacgcgccaggctggccttcgccgcctcgctctgctcaggcgttagcggataaatcgcggagcgatactgcgttccgcggtcgttaccctgctgcatgccctgcgccgggtcgtgattttcccagaatacctggagcagctgctcatagctgataacctgcggatcgtagaccacgcgcacggcttcagcatggccggtctcgccgctgcagacttcgcggtaggtcgggttgggcgtatagccgccggtatagccggcggcggtgctataaacgccgggcagctgccagaacaggcgttcaacgccccagaagcagcccatggcgaacagggcgacttccattcctgcgggaacgttggtcatcgagtgaccattgacggcgtggagcgtagccaccggcatcggcgtgttgcgtcccggcagcgcgtccgcttgggcgacaagatgcgttttatcaaatagactcacggtgggcctctcaaaacagaaaatgtggttaaggttgtaaccaagcgtgtctttgaacacaataaacgcgcttaatacgtctagatttaaacataagaattatttgggataacgtctatttttcaacccttagttgttagggttttgttaagccgtggagcggcactttcgtttccttcggggggaaacaaggatattcaggagaaaaagtgctacaaatccgccagttatgtatcgccagcgttttgctggtcagcggggtcgccagcgcagcgagcgtgcgtttgcaggttgagggactatccggggaactggaaaaaaacgtccgcgcccaactctctacgatccagagcgatgaagtcacgccggaccggcgctttcgcgcgcgcgttgatgatgctatccgcgaaggactgaaagcgctgggctactacgaacccacgattgattttgatttacgtccgccgccggcgagggggcgtcaggtgctgatcgccaaagtcacgcccggcgaaccggtgcgcattggcggcactgacgtgattttacgcggcggcgcccgaaccgatcgcgactatctggatttgctaaacacgcgcccggcgatcggcacggtcctcaatcacggtgattatgacagctttaaaagctctctgacccgggttgcgctgcgtaagggctactttgacagcgagtttaataaaagccagcttggcgtttccctcgaccggcatcaggccttctgggatatcgactacaacagcggcgagcgctaccgctttggcccggtcacttttgaaggctcgcaaattcgcgacgaatatctgcaaaacctggtgccgtttaagcagggcgactactacacctcgcaggatttagccgaacttaaccgccgcctggcggcaaccggctggtttagctccgtcgtggtggcgccgcagtttgacaagtcccgccagacgaaagtgctgcctttgcagggcgtggtctctccgcgtaaagagaacaccgtggaaaccggggttggctactcaaccgacgtcgggccgcgcgtcaaaggcacctggagaaagccgtggatgaactcctacggccacagcctcacttccagcctcagcctttccgcccctgaacagcaacttgatttcagctacaaggtaccgctgttaaaaagccccctggagcagtactacctgatgcagggcggctttaaacgtacggatctcaacgataccaaatctgactccaccaccctggccgtttcgcgctactgggagatgtcgagcggctggcagcgcgcgctgaacctgcgctggagccttgaccactttacccaggccaacgtcaccaacaccaccatgctgatctatcccggcgtgtcggtgaaccgtacccgttcgcgcggcggcctgatgccgacctggggcgattcgcagcgctattcggtggactactccaacaccatgtggggctcggatattaactttattgtgatgcaggcgcaggacgtctggatccgcaccctttatgaccgccaccgcttcgtggtgcgcggcaacctcggctggattgaggccgataacttcagcaaagtcccgccggatctgcgtttcttcgccggcggcgaccgcagcattcgcggttataaatacaaatctatctcgccaaaagatgacgacggcaaactgatgggggcctcgaagctggctaccggctcgctggagtatcagtacaacgtgagcggcaagtggtggggcgcggtgttcgtcgatagcggcgaagcggtaagcgatatccgcgaaagcaactttaaaaccggcgccggcctcggcgtgcgctggcagtctccggttgggccaatcaagctggatatcgccagaccgatcggcgacaaagaagagcacggtttacagttttacatcggtctggggcctgaattatgagtttatggaagaagataagcctcggcgtactgatttttctgctgctgctgctggggacggtaggattcctggtggggacgacgaccggcctgcatctggttatcaaagccgccgatcgctgggtcccggggctggaaatcggtaaagccaccggcggctggcgcgatctgacgctggagaacgtgcgctttgagcagccgggcgtggcggtcaccgccggccagttccatctgggcgttaagctgcgctgcctgtgggacagcagcctgtgcgtcaacgatatctccctgcgcgatatctatgtggcgatcgataccagcaagatgccgccagcggcgccggttgaagaagaagagagcgggccgctgaatctctccacgccttatcccgtcaccctgagccgggtggcgctgcataacgtcaacgtaaaaattgacgataccgccgtctcggtgcgcgacttttccacggggcttaactggcaggagaaaaacctcaccctgacgccgacctcgctgcaggggttgctcatcgcgctgccgaaggtggcgaaggtggctcaggagcaggttgtcgagccgaaaattgacaacccgcagccggaagaaaagccgctcggcgagacgatgaaagagctgttctcgaaaccggtgctgccggaaatgactgacgtccatctgccgttgaatcttaatattcaggcgttccgcggcgagcagctgcgtctcaccggcgataccgatataaccatctacaatctgctgcttaaagtcagcagcatcgatgggcagatgaagctggacgcgttggacgtggactccgaccaggggaaagtcacggcttccggtaacgcgcagctgcaggataactggccggtcgatatcaccctcaacggtacgctgaatattgaccccctgaagggcgagaaagtgcagctaaaagtgggcggcgaagtgcgtaaaaagctcacggtcggcgtcgatctgaatggtccagtcgcgatgacgctgcgcgccgaaacgcagctggctgaggccggcctgccgctggatatggaggtgaaaagcaagcagctctactggccgtttaccggcgagaaagcgtatcaggctgacgatcttctgctgaaatttaacggcaagatgaccgactacaccctggcctttagcaccgcggtgaaagggcagtcgctgccgccagcgaagattaacctgaacgcgaagggcaacgagcagcaggtaaatctcgataagctcaccgtcgccgccctcgaagggaaaaccgaactgaaggcgctgctcgactggcagcaggcgatcagctggcgcggcgaactgacgcttgacggtatcaacaccgctaaagaggtcccggactggccgtcgaagctcaacggtctgattaagacccagggcagcctgtacggcggcagctggcagatgtcggtgccggagctgaaaattaccggtaacgtgaagcaaaacaaagtcgatgtaagcggatcgctgcagggcaacagctatatgcagtggaaaatccccggcctgcatctggctttaggccctaacagcgccgacgtgaaaggcgagctgggggtcaaagaccttaacctcgacgccaccattgatgcgccgcatctggataacgccctgccgggcctgggcgggacggcgaaagggctggtgaaggttcgcggcaccgtcgacgcgccgcagctgctggcggatatcaccgcccgggcgctgcgctggcaggagctgtcggtggctcaggtgaacgtgaagggcgatgtgaaatccaccgaccagattggcggtaaccttgacgtacgcgttgaccgtattagccagccgggcgtgaatatcagcctggtgcagctcaatgcgaagggcaatgagaagcagcacgacctgcagctgcgggtgcagggcgatccggtctccgggcagctttcgctggcggggagctttgaccgcaaagcggagcgctggaaaggcacgctgagcaatacccgtttccagaccccggtggggccggtggcgctgacgcgtgatatcgcgctggattaccgcaaccttgagcagaaaatcagcatcggcccgcactgctggactaacccgaacgccgagctgtgcgtaccgcagaccatcgacgccggcgcgagcgggcgcgcggtggtgaacctcaaccgtttcgatctcgcgatgctcaagccctttatgccggaagcgacccaggccagcggcgtgtttagcggtaatgccgatgtgagctgggacaccaccaaagaggggctgccgcagggtaaggtcaccctgagcgggcgtaacgtgaaggtgacgcagacggtcaacgacgcgccgctgccggtggctttcgataccctgaacctcacggccgatctgcacaataaccgcgcccagctgggctggctgattcgcctgaccaacaatggccagctggacgggcaggtgcaggtcaccgatccccagggccgacgcaatctgggcggtaacgtcaatatcagcaacttctcgctggcgatgatcaaccctatcttctcgcgcggtgaaaaggcggaagggagactgaacgcgcgtctgacgctgggcggtaacgtccagagcccgcagcttttcggtcagatgcagctgaacggcgtggatattgacggtaactttatgccgtttgatatgcagccgagccagctggcgatgaattttaccggtacccgttcgaccctgcaggggacggtgaacactcgccagggacagattgcgctcagcggcaacgccgactggacgcagattgacaactggcgcgcgcagattgcggcgaagggcagccgggtgcggataaccgtgccgccgatggtgcgcctggatgtgtcgccggacgtggtctttaccgccacgccaagcctgtttaacctggatggcagcgttgatgtgccctgggcgcgaatcgtcgtcaacgaagtgccggaaagcgccgttggggtctcatctgacgaagtgatgctggataaaaatctgcagccgattaagcagcagagcgccggtatccctatcaacagcaatctaacgattcacgtgggcaacaacgttcgtctcgacgcctttggtctgaaagcgcgtctgaccggcgatttgaaagtggcgcaggacaaacaggggctggggctcaacgggcagatcaacatcccggaagggcgtttccatgcctacggccaggatctgatcgtgcgtaaaggcgagctgctgttctccggtccgccggatcagccgctgctgaacatcgaagccattcgtaatccggacgccaccgaggacgacgttatcgccggcgttcgcgtgaccggctcggccgatcagccgaaagcggagattttctccgatccggcgatgtcgcagcaggaagcgctctcttacctgctacgcgggcagggtttaggcagcggacagagcgatagcgcagccatgacttcaatgcttattggtatgggggttgcacaaagtggtcaggttgtgggtaaaatcggcgagacgtttggcgtaagcaatctggcgctggataccgagggagtgggcgactcctcccaggtggtggtcagcggctatgtactgccgggtctgcaggtaaaatatggggtagggatctttgactccctggcgacgttgacgttacgctatcgcctgatgcctaagctatatatggaagctgtgtctggcgtagaccaggctctcgatttgctctatcagtttgagttttagcaatgcgaatatttgtttacggcagtttacgacgcaaacaaggcaacagccactggatgaccaacgctcagtggctgggcgatcatagtgtcaatgattatcaactgtacagcctgggccactatccaggcgcggtgcccggcgatggcacggtacatggtgaggtctatcgtattgacgcatcgacgctggctgaattggatgcgctgcgtaccaaaggcggcgagtatgctcgtcacctgatccagacgccctacggtagcgcctggatgtatgtctatcagcgccccgttgagggcttcacgctgatagaaagcggcaactggttggataaagaccagtattaataacgataacgccaccttcgggtggcgttgttttttgtggcgttgggtgctgtcgccggctcgggcatggatcaacggccaaaaaaacaccgcccggaggcggtgtttttgcgaacctgagtgcggctgaattacttcttagcgcgctcgaaggaagccacgatttcagctttcgccgcttcagcgttgtcccagccgtcaaccttaacccatttgcccgcttcgaggtctttatagtgctcgaagaagtgggtgatctgcgctttcagcagttccggcaggtcgttcacatctttaatgtgatcgtactctttgctcagcttggtgtgcggtaccgcaaccagtttcgcatcttcaccggattcgtcggtcattttcagcacgccaaccggacggcagcggatgactgaacctggctccagcgggtacggcgttgggaccagaacgtcaaccgggtcgccgtccagggacagggtgtggttgatgtagccgtagttgcacggatagaacattgccgtggacatgaaacggtcaacgaacagtgcaccgctctctttgtcgacttcgtatttgataggatctgcgttcgccgggatctcgatcacgacgtagatgtcttccggcagatctttgcccgcaggtacgttgagtaagctcatgtctgtttcctttaaaatgtatggcaaacaagtgcccggtattatagccaactcacatcgaatgtcttcgcttctttttccccagaacgggtgggtggagtctgaatttttcagcgtaagacagcctgaaaatccataaacatagccgcatactgaataaaattatgtaaccgttttcattgcatatgcttgatatctcaaagtgtgcaaaatttcgtcataaacggcgaagctcgcgcggctcgcgaagcctcaccggctctccgctggtgagatggccgccgattaacatctaattaacttttttgaagtgtgatgtaacgcattcagttacatctccgattgtctatagtttgtccgcaggtgaggctttaaccaacaataaccctacgaggatcctcttatgtggaagcgcttacttcttgtcacagcagtttccgcagctatgtcgtctatggtcatggctgcccctcttaccgtaggtttttcgcaggtcggttctgaatccggctggcgtgcggccgaaactaacgtcgcgaaagaggaggccgcgaagcgcggcatcactctgaagattgccgacgcgcaacaaaaacaggaaaaccagattaaagccgtacgctcctttatcgctcagggcgtcgatgccatcttcatcgcgccggtcgtggcgaccggctgggagccggtactgaaagaagcgaaagaggccaaaatcccggtattcctgctcgaccgctcaattgatgttaaagacaaagatctctacatgaccaccgttaccgcgaacaacgtgctggaaggccagctgatcggcgagtggctggtcaaaaccgtcgacggtaagccgtgtaacgttgttgaactgcagggcaccgtaggggccagcgtggcgattgaccgcaagaaaggcttcgctgaggccatttctaaagcctctaatatcaaaattatccgctcccagtccggcgattttacccgcagcaagggcaaagaagtcatggagagctttatcaaagcggaaaacaacggcaagaacatctgcatggtttacgcccataacgacgacatggtgattggcgccattcaggcgattaaagaggccgggctgaagccgggcaaagatatcctcaccggctctatcgacggcgtgccggatatctataaagcgatgatggccggcgaggccaatgccagcgtcgaactgacgccgaatatggccggtccggcgttcgatgcgctggagaaatacaaaaaagacggcaccctgcctgaaaaagtcaccatcaccaaatcgaccctctacctgccggatacggcgaaagaagagttagagaagaagaaaaatatgggctactgagtagccgaatgacaggttcaccgccgcctccgggatgtccccggtcgctaaagcgcggctgatttccctctcctcccatcggggagagggcaaaggtgaggggggagagcatgaacggcgaattacatcaggaaatccttcgtactgaagggcttagcaaatttttccccggcgtgaaggcgctggataacgttaattttagcctgcaccggggcgaaatcatggctctgttaggcgaaaacggcgcgggtaaatccaccctgatcaaagcgctgaccggcgtctatcatgccgatcgcggggccatctggctggaagggcgggagatcgcgccgaaaaataccgctcacgcccagcagctggggatcggcaccgtctatcaggaagtgaacctgctgcctaatatgtcggtggcggataatctgtttatcggccgcgagcccagacgctttggcctgctgcggcgtaaagagatggaaaagcgcgccaccgcgctgatggcgtcctacggtttttctcttgatgtccgtgaaccgctgaaccgcttttcggtggcgatgcagcagattgtcgcgatctgccgggcgatcgacctgtcagcaaaagtgttaattcttgatgaaccgaccgccagcctggatacccaggaggtggagatgctctttaccctgatgcgccagctgcgcgatagcggggtcagcctgattttcgtcacccacttcctcgaccaggtgtatgccgtcagcgatcgcatcaccgtgctgcgtaacggcggttttgtcggctgccgggaaacccgcgagctgccgcaaattgaactggtgaagatgatgctgggccgtgagctggagcataacgccctgcagcgcgcgggccgcaccctgctgagcgataagccggtggccgccttcgaagattttggcaaaaaaggcaccatcgcaccgtttagtctgcaggtccgtcccggtgaaatcgtcggcctggcggggctgttaggctcgggacgtacggaaacggcggaggtgatcttcggcattaaacccgccgacagcggcaaagcgtggatcaaaggcaagccgcaaaccctgcgctcgccgcatcaggcatcctgcctcgggatcggcttctgtccggaagatcgtaaaaccgacggcattatcgccgccgcctcggtgcgggaaaatatcgttctggcgctacaggcgcagcgcggctggctgcggccgattggtcggcgcgaacaaaatgagattgccgaacgtttcattcgccaactgggtattcgtacccccagcgctgaacagccgattgaatttctctccggcggtaatcagcagaaggtgctgctctcccggtggctgctgacgaagccgcagttcttgatccttgatgaaccgactcgcggtattgacgttggcgcccacgccgaaatcatccgcctgattgaaaccctgtgcgccgatggtctggcgctgctggtcatttcttcagagctggaagagctggtgggttacgccgatcgggtgattatcatgcgcgatcgccagcaggtggcggagctggctctgagcgagctctccgtgccggcgatcatgaacgctattgcggcataaggagtaaccgatgatgcctcaatctgttccgaaaaccggccagccgaaacggcgctttaactggccaaaagggatgccgcaaattattgcgctgctgctggtgctggtcgttgacagcctggtcgccccgcatttctaccagatcgtgctccaggacgggcgactgttcggcagcccgatagatattttgaaccgcgccgcgccggtggcgctgctggcgattggcatgacgctggttatcgccaccggcgggattgacctctccgtcggagcggtgatggcgattgccggcgcaacggcggcgtcaatgaccgtggcggggcacagcctgacggttgtgctgctcgcatcgctgggggccggcgcgctggccggtctgtggaacggcattctggtggcggtgctgaagatccagccgttcgtcgccacgctgatcctgatggtcgccggacgcggcgtggcgcagctgatcacctccgggcagatcgtgacctttgactctccgcatctggcgtggctcggcagcggatcgctactgctgttcccgacgccggtgattatcgccatcgtgacgctggtgctgttctggctgtttacccgcaaaaccgcgctggggatgtttatcgaagcggtggggattaacattcgcgcggcaaaaaacgccggggtaaatactcgcatcgtcgtgatgttggcctacgtgctgagcggcgtttgcgcggcgattgccggcattatcgttgcggcggatattcgcggcgcggatgccaataatgccgggctatggctggagctggacgccatcctggcggtggttatcggcggcggctcgctgatgggcgggcgctttaacctgctgctctcggtcgtcggggcgctgattatccaggggatgaataccgggatcctgctgtcaggattcccgccggagcttaatcaggtagtcaaagcggtggtggtgctgtgcgtactgatcgtccagtcgccgcgctttatcagcatactgaaggggatgcgcggccatgataaaacgtaatttaccgttaatgattaccctcgcggtcttcgtactgggatacctttactgcctgacccagtttcccggctttgcctcgacgcgggtgatctgcaatatcctgaccgacaatgcctttcttgggatcatcgccgtcggcatgaccttcgtgatcctctccggcgggatcgatctgtcggtcgggtcggtgatcgcctttaccggcgtatttctcgctaaagcgatcggtttctgggggatttcgccgctggtggcgtttccgctggtgctggtgatgggctgcgcctttggcgcgtttatgggcctgcttattgatgcgctgaagatcccggcgtttatcatcaccctcgccgggatgtttttcctgcgcggcgtcagctacctggtctcggaagagtcgattcccattaatcatccggtgtatgacgcgctgtcaggactggcatggaccatccccggcggtgggcgtctgagcgcgatggggctgctgatgctgctggtggtgatcggcggaatttttatggcccaccgcacccgcttcggtaatcaggtttatgccatcggcggcaacgcgacgtcggcgaacctgatggggatttccacgcggagcacgacgatccgcatttatatgctctctaccgggctggcgacgctggcggggatcgtcttctccatctatacccaggcgggctatgcgctggcgggcgttggcgttgaactggacgcgattgcatcggtggttatcggcggtacgctgttgagcggtggggtggggacggttctcggcacgctgtttggcgtcgccattcaggggctgattcaaacctacatcaacttcgacggtacgctgagttcatggtggaccaagatcgctatcggtatcctgctgttcatctttatcgcgctgcagcgcggcctgacggtgctgtgggagaatcggcagagttcgccggtgacaagggtggggcactgacggaaggatttcccctcccgtaaggcgggaggggaagaggcgggttacgcgtccgggaactctttaataaagttttcgacgtcttcaaccatatggttgttgccgacgaagaaagaacggcgctgatgcagactttccgggatgatatccagaatacgctctttaccatcgctggccttaccgcccgcctgttccgcaaggaacgccatcgggttgcattcgtacagcaggcgcagtttaccgtccgggtggctggcggtgctcggatagagatagatgccgcctttaagcaggttgcggtggaaatccgccaccagagagccgatgtagcgtgaggtatacgggcgctgggtctctttatcttcttcctggcagtgcttaatgtacttcttcacacccatcgggaacttaatgtagttaccttcgttaatcgagtaggtgttgcctttttccgggaagcgcatgcgctcctggcacaggcagaagacgccaagggaggggtcataggtaaaggcgtggacgccgcagccggtagtgtaaaccagcatcgtcgaggagccatacaccacatagcccgcggcgacctgtcggttgcccggttgcaggaaatcttcttcggtaacgggggtgcccaccggcgtgacgcggcggtaaatagagaagatcgtgccaacagagacgttaacgtcgatgttagaagatccatccagcgggtccatcagcaccacgtatttggcgtgttcgcatccttcaaagacgacgatctcatcttcttcttcagaggcgatcccggcaacaatatcgcgtgctcgcagtgcggctttcaacttttcattggcaaacaggtcgagtttttgctgaacctcgccctgaacgttttcagcaccgctggcacccaggatatcgaccaggccggccttgttgatatcgcggtggatgatcttggcgcctaactttatcgccgacaacaaagcagtaagctcgccggttgcgtgagagaactcgtgctgcttttcgacaataaattcacctaacgttttcataacccgttccctgcatgtttatgtgaagtaaaacgaacataacaatcttaacaaagaataaaaaaagttcgcactggtgaatcgcgccagcaaaatacggattcgcctgaaatgcatttctttcccccccaacatcccggtaaactgtgcttcagataagagaaggaaatgacgaatgcgcattcatattttaggaatctgtggcacgtttatgggggggctggcgatgctggcgcgttccctcggtcatgaggtaacggggtcggatgcgaacgtctatccgccaatgagtaccctgctggaaaaccagggaattgagttaattcaaggatatgatgccagccagctggatccgcagccggacctggtgatcatcggtaacgcaatgacgcgcggaaacccgtgcgtggaagcggtgctggaaaataatatcccttacatgtccggtccgcagtggctgcacgatttcgtgctgcgcgatcgctgggtgctggcggttgccggaacgcacgggaaaaccaccactgccggcatggcgacctggatcctcgaagcctgcggctacaagccgggctttgttatcggcggcgttccgggcaacttcgatgtttccgcgcgcctcggcgacagcccgttcttcgtgattgaagccgatgaatacgactgcgctttcttcgataaacgttccaaatttgttcattactgcccgcgcacgttgattctcaataaccttgaattcgaccacgcggacatctttgacgatctaaaagctattcagaagcaatttcatcatctggtgcgtattgtgccgggcaaaggcaagattatcctgccggagaacgacatcaatttgaagcagacgatgtcgatgggctgctggagcgagcaggagctggttggcgaacaggggcactggcaggcgaaaaagctcaccaccgatgcttcctcctgggaagtgtggctggacggcgagaaagtcggcgaagtgaagtgggcgctggtcggcgagcataatatgcataacggcctgatggccatcgccgccgcccggcatgtcggcgtgctgcctgccgatgcggccaacgcgctgggcagctttatcaacgcccgccgccgtctggagctgcgcggcgaagccaacggcgtgaccgtatacgatgatttcgcccaccacccgacggcgattctggcgaccctgcaggcgctacgcggcaaagttggcggtaccgcgcgtattcttgccgtgcttgaaccccgttctaacaccatgaaaatgggcatttgcaaagacgacctggcgccgtctctcggtcgcgcggacgaggtcttcctgctgcagccgcagcatatcccgtggcaggttgctgaagtggctgacgcttgcgtacagcctgcacactggagcgccgatgtcgatgcgctggtggatatgattgttaaaaccgcccatcctggcgaccacattctggtgatgagcaacggtggatttggcggcattcatcagaagctgctcgataagctggcgaaaaaagccgaggcggccgagtaggctattctcctcgtttatccgccctccgcgtgagggcggatagtttttgtggccaggagggttcatgttgaattcagaaagagtgacctctaccgattccgcgcattttcccgcgcttgatgcgctgtacggcagggccttcccgtggcacgagcagcgtgaagccgaggctaagcagcaggcgcttgataatccgcattatgaactggaagcctggttcgatgatggccagtttattggcctgagcggctgctggcggtttgctgactatcgctacgttgaacatctggccatcgacgataccttgcgatcgcgcggctacggcaagcggctgttagctgaaatacttcagcgcgcgccgctgaccgttctggaaatcgatccgctgaccagcgaagttgcccataagcgcctgcgcttttatcaaaccatgggcttttgcgcgaatccctgggcgcatcgccatccgacctatcatcaaggcatcgccgatcatgaactgatcgtgttgagctatccgcagccgattaatgaggcgcagtaccagcgctttgcgcaggatttgcgtttggtggtcatggagcaggctggcgcggtcaaggttttgtagcccggacaaggcgcgtcaagcgccgcctccgggaagcagcgcgcaatgtcacctccgctgttctcccggctcgcgctgcgcttagccgggctacgggtttaccgtcgtctgcgggccggtagtccggacaaggcgcgtcaagcgccgcctccgggaagcagcccgcaatgccacctccgttttctcccggctcgcgctgcgcttagccgggctacgggttcagcgccgtctgcgggccggtagcccgggtcaggcgttacgccgcaacccgggatgggctcaaagcttacgctactccttcgcgataggcgtttcgtcttccgctactttggtatcgccctgaatggcagcgattttcttctccacgtcggcaacctgctcgctgctgtgcagcagcgtataggtcagatcaaactgggtgcttgccccgggctgaagctgcttaacgcgtttttgctcgcgctcgatggttaccggataggcgtagctggtacccggctcaataccggtcacgtaaccctgtttctcggtatcggtgtttttccacagcgtcagcaccggcagctggcgggtatcaaactgaatcgatgcccctttgtcgccggctttgttgaccaccgcggccagcgtttgatgattttcgtccgccagcggctgcatgttaaacaccatttcatcgaaatctttggttggaccggcgtaggtttgccaggtttttaagccggctttggcgtagtcattgaacgggctgatgctggcgatcggcgccataaagcgggccccctcttcgaggatcggcttgccaaagttgctgtgatagataatctgatagtcatgcggatagtcagcatggttggttaagacatcgtgcaggctgaagctgttgctgccgggtacatagcgcagctcggtcatggtctgcagatccgctttcttaaacgtgctctccttcaccagcccgcgaacgcgaatttcatacggcgcggtgtccgcgacttccacttccacctgtgaagccggcgtgttgccgaccttgccgtgcagggtataaatctgtccgtctgcggttaccgggtggccggtccattcatagccgcagcgcaccatcatttcattgaagccttccagccagcccagcccgttgcggctttcgaggttaataaaggccgggttgaccacctcttttaccggtgagtcccagcccatccgtgaaccaaaaccttcgattttcagcagattcatgccgcgagtcgggctcagggtaatcgtcaggccgtctttgctgtggattacgaggattttgctgccttcctgtttcccgccgtgaaggactttttgctcaatgctgaagttatgatcttttatcttcagctggtcgctggttatctgccagtttcctttatccatgccgctttcagcgcttgtcagcacccatgttttcgcgactactggcccagaaacaagcatggcaattgctgttaaagctaatgtttttttcattttttaacccttttgctgaatcgattgtgttgctgatgcaggaaatttagttgtaagtggattatgaaaatgtgaagtgtctcacctggtgagaaaacggccgtttttatatttttaaatgagatttaaatcgctttttttaagtaattataaaagttgttgctaaaaaaatgtgaatcaggatgattttagctttaacgattcagctattactggctacggctatgatgaagcctttagaaacgacagggccgccgggctttagtggcccaggcggccctggttgaagcggctttatcgtttaaaaaaaacgcagcggggaggttatcaagcgccgtagaacgctttggtatagagccctttgacatcctgaacggacggatagttaggattcgttaatgtgcagggatcgtcaacggcatggtgactcattctgtcgaggacgttcacaaaggtgatttcattgatttcaacttcgccgcactggcttagcgttttcggcacgcccagacgttgattcagcgcgttgatcgcttcaatcaggtttttgatgcctaacgccgcttccagctgacgatattttttggtgaacttcgcattatattgaatgatataaggcagcataatcgcgtttgccagaccgtgggtaataccaaactcgccgccaatcttatgcgccattgaatgaactaaccccagcgaggcgttggtgaaggcgattcccgccagcgcagaagcattgtgcatatgcatgcgggcgtttaaatcatcaggtgagcaccaggcgatttccagatacgtaaacaccagccgaatcgcttctaccgcataggggtcagtaaacgagttggccgcggtggagacataggcttcaatggcgtgggtcagaacgtccattccggtatgaacggtaacgtgcggcggcatttttgccggaatggtggggtcgagaatggcgatatccggtaccagatcggcggcaacaatcgggtatttgatatgatttgccgtgtcggtgatcaccgaaaatgcggtgatctcagaggcgctgccgctggtggaagggatcgccacaaatcgggctttattgcgtagcgccggcatggaaccgaccgggagaatatcctcgaacttcagctgcggatgctcgtagaaacaccacattacttttgcggcatcaagcgcggagccgccgccaatcgccactatccagtccggttcaaaagcctgcatcgcttttgcgccgcgccagacggttttaatggacggattgggttcgacattatcgataataatgcactccatacccgctttattaagttcgctgacggctttatccagaaagccaaaacgcttcatggaacttccgccagtgactaacgcggcttttttgccgctcagcgtggaaagatgttctaaagcattttcgccataaataatactgcgaggaattgagaaggcctgggtcataggaaactccatttaatattaaggatttttttagtgtgcattcgtcatttacgattcagcgacacgtgcagagtaaaaaaatcgaattaatgctccagatattgccgaagcaatatctggagggagttgaccgtcatacttcgagcggctggtgcgttgactgcaacttgaattatttggggtattagcggcgtttaaatcgtaccgtcccaggagtcgactttttcgcgtttcgcttcctcttcatcaaaccagcgcgaggtcacgcattttgattcggtgtagaaacggacgccgtctttgcccaggcagtgcaggtcgccgaagaaggactgcttatggcctgagaacgggaatacgccgaccggcaccggaataccgacgttgataccgaccatgccgccgtgggtgcgtttctggaattcgcgggcgtagtagccgctttgggtgaaaataaccgagccgttggcaaacgggttattgttcataagttgcagaccttcctcgaaggttttgacccgcttaaagcacagcaccggcccgaaaatttcctgcgtgccgacgctcatctcttcggttacgcgatccaggatggttggcccgacgtagaagccattttcctggcccggcacctgaatagcgcgaccatcgagcaccagctttgccccctcctcaatgcctttattaatccagttgatgaccgattgcttatgatctttagaaatcaccggacccatatcggtatcgcgcagatagccggggccgattttcagctgtttggctttctcgacgacggcggcaatcagcttatcagcgatctcttcctgcaccacgacaaccggcagcgccatgcagcgttcgcccgcgcagccaaacgcggcgttgataatccccgctgcggtacggttaattggcgcatcggccagcaccagggcatggtttttcgcttcgcacagcgcctgaacgcgcttgccgtgagcggcggctttggagtaaacgtgcagacccacggaggttgagccgacgaaggagacgccgttgacgtccgggtgggtcagcaagatatcggcttcattgcgtgagcaggtcacgacgttaatcaccccatccggcacccctgcttcctgatagagtttggtgatttccatacaggtcatcggcgtcatactggccgctttaatcaccatggtattaccggaggcgacgcataatggcgccatccatcccatcgggatcattgccgggaagttaaacggcacaataccggcgaacacgccaattggctcacgataaaggttggtgtcgatcccggcagaggcgtccatcaggttttcaccggccatgagagtgggaatcgagcaggcaagctcggtaccttctttcgcttttaatacatcgccctgggcgtcgccccaggctttaccgttttcttttgccaccagctcggttaagcggtcctgatgctggattaataattcgcgaacgcggaacataatttgcgagcgtttaatggccggcgtatctgaccacgccggaaaggctttgcgcgccgcggcaacggcatccagcacttcttgctcggtgcagcagggggcctgagccatgacttccccggtacttgggttatagacgtccatatagcgttcggtctgcgatacgcgccattgaccatcaacgaaatatttcagccttggtacagtagtcatatttttctccatgatgatagctgtcgactctctaaaatctggctccggtcggcggcaaataaccgaccgccgggttagcccctctcgtgaaaagtgaattccagcttcttgccggacgatggcctccgctgggcgattcacctgcggcggtgcggatgattttgtcgactttctgctgaggaaagcctgcagacgccaggttttaatgaacagaactcactggccaaaaatacgcgcacgcaccgtttcggttctcgtactttaatgaaatttatttttcattattatgatgtatgaaatatcaaaaccgttttgagaggtggatcaaagataagcaaactgctgataaagtcagcgccataaagcaggattatatagttttatataataaagttaacaggttgtgttgatggcattggcgttgatggcgaggggaaattgccagccggattgcaatggaacggcttttttgtgaaataaaagttaaatataagcgcgaactggaatgaaaatgaaaaattaaaaccgatttaaatgcaggggaaattcgaattgaccattgtccatggcattgcgttcgagggagtgggtcgcccggatcgggcaatagccgtaatccgggggagtcatacagaattagccttcgctttcggccagttcgcgcaggtactggaagataagacgcgcggacttcggcggcttgttgccttctttctcttttttggcgttgcggatcagcgaacgcagctgctgacgatcggcatctggccacaggttcagcacttcagccacggcatcatcaccattatcaatcagacgatcgcggatctgctcaagcttatggaacagcgcaacctgctggttgtggcggttcttcagcttgtccagcgcctgacgaatcggctcgacgtcgcggctgcgcagcattttaccaatcagctgcatctggcggcggcggccttctttcttgatacgctgggcgagttcaatcgcgtcgcgcaggtcggtatccagcgggattttatcgagcgcgtttttacccagctcgaccatttccgcgccaagacgcttcagttcttcggcgtcacgcttaatttcacttttactgacccagataatttcatcgtcttcatcttcgacgtcatcaccagggacgtcgtcgagccagtcttcgggctgctttgtcatctcaggctccttaaaaaagagactaatgttaccagttaaggcgcgcactgaaaaacggttctctgttagacttcagttaactccttcttacattatggcattagcgatgaaagtcatctctcaagttgcacaacagcgtaagacgctggaagaggccgtgaccacggcgctggaactggcggcaggcaaatccgacggcgcggaagtctccgtcagtaaaactaccggtatcggcgtgagcacccgctacggcgaagtggagaacgtagaattcaacagcgatggtgctctcggcatcaccgtttatcaccagaatcgcaaaggcagcgcgtcttcgaccgatctcagcccgcaggctattgcccgcacggtgcaggcggcgctggatatcgcccgctatacctcgccggacccgtgcgcgggcgtggcggataaagaactgctggcttttgaagccccggatcttgacctgttccatccggcggaagtttccccggatgaagccatcgagctggcctcccgcgctgaacaggcggcgctaaaagccgataaacgcatcagcaataccgaaggcggcagctttaacagccactacggcattaaagtgttcggcaacagccacggcatgctgcagagctactgctctacccgccactcgctctccagctgcgtgattgccgaagagaatggcgatatggagcgcgattacgcttataccatcggacgggcgatagacgacctgcaatcgccggagtgggttggcgaagagtgcgcccgccgcaccctgtcgcgcctggccccgcgtaagctatcgacgatgaaagcgccggtgattttcgccaacgaagtcgctaccggtctgtttggccatctggtcggggcgatcgccggcggttcggtttaccgtaaatccaccttcctgcttgatgcgctgggtagccagatcctgccggactggctgaccattgaagagcatcctcacctgctgaaaggtctggcttcgacgccgtttgatagcgaaggcgtccgtacggaacgccgggatatcattaaagacggcgtactgacccagtggctgctgaccaactactcggcgcgtaagctggggctgaagagcaccggccacgcgggcggtattcacaactggcggatcaacggccgcggcctgagttttgcaaagttgcttaaagagatggggaccggtcttgtcgtcacggaactgatggggcagggtgtaagcggcgtcaccggcgactactcacgcggcgcgtccggcttctgggtagaaaacggcgaaattcagtatccggtcagtgagataaccattgcaggaaatctgaaagatatgtggcgtaatatcgtgaccatcggcgacgatatcgaaacgcgcagcaacattcagtgcggttccgtactgctgccggagatgaagatcgccgggcaataacacttgtgtgcttaataataaaaaaggaagtgagcaatgcgtaaaaaactgttagcgatgctggccgtatcggcttttgcgcttggttcggcatcggctttcgccgatctgggcgaagatatggatacccttgctgagaacctgcaagtggtgcagaaaacttcagatgccggcgagctgaaagcggcgctgaataagatgcgcacagcggcggttgacgcccagaaagagacgccgccgaagctggaaggtaaagcggcggacagcgcggaaatgaaagactatcgtcacggtttcgatgtgctgatcggccagattgacggcgcgctgaagctggctgatgaaggcaaagtcaaagaagcccaggccgcagcggaagagtttaaaaccacccgcaatacataccataagaagtaccgttaatttctctttgtggggaggcgtcagccgatgcctcccacattctgttaattcaaaactccatcaccgtcacatttttcgcttttcctgcatgccggttttcgccaccgtgacaccgatgatcttgtgatgttcatcacgagaattggttggggcgaatacatccacaataactatgtgaaatagatcacgcctgccttcttcctttccacttcgaagtggaaaacaactcgctacaaactctttgcccccggcattagtgttatccccagagacatcaacggggtaattcaagtgaataacggagcggtaacacacgtcccagaggagcaggccacgctaaccgaacagctggccgacaagatgctgcagcaggttttcgcactattaagccgccgcaacatcgtccccaacgacgttcaggagcaaatgctgacttcccacgttcgggcgatggcccatcggtcaatcagcggcgagccgctgccggaagtggatgccagcctgttcgaagagatctcagaagattcaatgatgctggcccgcgaagtggtcgcgcagttcggcaatctgccagatgaagaagcctggctgctgtccgtccacttcgaagtcgcgaaagataacctgtaaggagcacacaaatggaacaaatcaccgttgttattggcgatcgcctgggtaaaggacaaaaagttgccgcaggtgcggaaaaagccggcgctcgcgccgtggtcgtgccgggcgttgccgcggatatgaagctgggcgacatgatgaaggcggaaaacgccaccttcggtatctctttctgcggcagcggcggcgcaggggctatcaccgcgcagaataagcacggctacaaggcgaaatatggcatgcgttccgttgatgaaggcgtcaccgcgatcaacgaaggctacaacgtactgggcttcggctttatggataaagaagagctgggtgaacgcctggttgaggcctggaagaagaagtacggcgcgtgagcatgaaagagcaattcaccaccacggtgagcgtaaccggcaaaggcgagagcaaaacgcgcgcttttgccgatgccctgaaccatgtccaggcggcggtgatgaaaacgtcgccgcacatcttactgcgtattgaaccacaggacgtggaggttgttcatgcgcgtgaagcggtacggaaagaggcctttttattcttctttttgcgccgtgagcgacgaacctacagcgtggagctgaaggtcaccgtcaccgtgaccgccattaatctcgataaagtggatttcgtcacgcaaacctgattttcaccaaagggtcagactatgttcctgataattttaataaaatcgcttatcatcggcggcctggttggcgtcggcgtaggcgccggagcggcacgcatgtttcatgcgcccaccacgcaggggatgggggcgtttcgtaccttgggcgagctgaattcatgtgaaggcgatccggcttcccacttctcatttggcctgggcttcttcttcaacgcctgggcctcttccgtcgcggcaggctccttcactcaggacgttgaccaccgcattatccccaactggggggcggcagcgctgatgattaaaaaccgcaacgtcggcgagacgctgcacgatccgaaaaagatggccatcgcctgcggcattatcggcatgatcgtggtcgctttcctcaacctcaccgcctcttctgtaccggaagcgctgcaggtgacggcggtaaaagtgctggttccggcggcaaacctgctggtgaatacggtgatgccggtcatcttctggctggcggcgattgatgccggtaaaaaatcgggcttctgggcgacgattttcggcggcgcggcgcagctgattatgggtaacgccgttccgggcctggtgctgggcatcctgatcgggaaaggcgttgaagagagcggctggcaccgcgtcaccaaggtgatgatggtggcgatcgtcgcgttgttcgttctgagcggcttcttccgcggtttcgatatgaagatgattgaatccttccatctgaccgtgccgaactggctggaactgatccacaactcgctcagcggtaaataacaggagcctctcatggaacaaaataaaggtttttggtatgccgactggtcgttcccgatctttgttggcctgctctccgccggcgtctttgccgggacgcatatgtactacctctacggcatcggcgcgtttaacgaagtcgccttcgtggcgatgctgaaagcgggaattgataccggggcctacggcgcggtagcggcgttcggcgccagcttcctgttcgcgcgtattatcgaaggctcgctggtggggattctggatatcggcggggcgattcagaccggcgtcggcttaggcgttccggcgctgctgctcggcgcgggctttgttttcccggtcgccaactttgccgcctcgctggtcaccggcctggtgctgggcctcgcgattggctacatcattatcctggcgcgtaaattcaccatcaaccagagcgattccacctacggtgcggacgtcatgatgggggccggtaacgcctcaggccgtttcctcggaccgttgattatcctcagcgccatgaccgcttccattcctatcggcatcggttccctggcgggcgcgctgctgttctacatctggcagaagcctatcaccggcggcgcgatccttggcgccatgcttcttgggtcaatcttcccggtggcgattagttaagtcctgcgggcgcctcggcgcccgcgttaacaggagagagacatgtttgatttactcctgcgccgtgcgcgcctcgtcgacgataccctgaccgatatcgccatccgggacggtaaaatcgcggcgcttggcgagattagcgcgcctgcgcgcaaaacccttgagctggacggtcgttattacgtcagtgcaggctggattgactctcacgttcactgctatccgaactcgccgatttaccatgatgagccggacagcgtgggggttgctaccggcgtgaccaccgtgattgacgcgggcagcaccggcgcggacgacgtggatgatttctaccagctgacccgcaaagccgcgaccgaagtttacgccctgcttaacatctcccgcgtcgggctgattgcccagaatgaactggccaatatggcgaatatcgacgcggaggaggtgaagcaggcggtcaaccgctacccgaactttatcgtcggcctgaaggcgcggatgagcagcagcgtggtgggggaaaacggcattacgccgctggcgcgcgcaaaggcgattcagcaggaaaacggcggcctgccgctgatggtgcatatcggcaacaatccgcccgaccttgatgagatcgccgacctgctgacctccggcgacatcattacccactgctacaacggtaaacccaatcgtatcctgacgccgtccggcgagctgaaaagctcgatttcccgcgcgctacagcgcggcgtgcgccttgatatcggccacggcaccgccagcttcagcttcgaggtggcgcggcgggcgattgctatgggcattctgccgcacaccatcagctccgatatttactgccgcaaccgtatcgacggcccggtgcgctcgctggcgctggtgatgtcgaaattcctcgccattggcatgtcgctgccgcaggtcattgactgcgtgaccgccaacgccgctgaaggcctgcgtcttagccacaaagggcggctggaagtgggttacgacgccgacctgacgctgtttactctcgcgcagacgccaacggtgctggtggatgcggaaaaagagagccttcagaccgacaagactctgctgccgcttgccgccgttcgcgcgggcaagggctatctgaccgaacaagggagcgcggaaaatgccttcgatttttgagaaatatgatttaaaacaggtgattaatacctccggtcgtatgaccattctcggcgtctccacgccgcggccggaagtggtggacgccgcgatggcggggatgaaccagtacttcgagatgaaagatctggtcaataaaaccggcgcgtatattgcgaagctgctggacgtggaaggggcgaccgtcgtctcctgcgcctcggcgggcatcgcccagtcggtggcggcggtgctggtaaaagacagcgactggctgctggaaaacctgcacgtgacgccgattgaaaacaacgaaatcgtgctgcctaagggtcataacgtcaattttggcgcgccggtgggcaccatggtggcgctgggcggcggtaggctggtggaagcgggctacgccaatgaatgttccgccgggcagctggcggcggccattaccccgcgcaccgcggccattctgtatatcaaatcccaccactgcgtgcagaaaagcatgctcaacgtggcgcaggcggcagcggtggcgcagagccataatctgccgctgattgtcgacgcggcggcggaggaagacctccaggcctactatcgcgccggcgcggatctggtgatttatagcggcgcgaaggcgatcgaagggccgaccagcgggctggtgattggcaaaacccaatacgttgagtgggttaaacgtcagtcgaacggcattggccgggcgatgaaggtgggcaaagaggggatcctcggcctgacctgcgccattgagcactatctgacggcgcgcaaagagagcggtgaagagatggtggcgaagatgacgccgtttattcagcagctcaatacgctcgatggcgtcaccgcgcgggtggtctgggacagcgccggccgcgatatcgcgcgggcggagatcaagtttgatgaagcggtgaccggcgtcgataccggcgatctggtcaatgcgctgaagcagggcgaatacgccatctacttccgtggctataaagcaaatgaaggcattattgaagccgatgtccgcagcgtgaacgcgcagcagctggagattgtctcccgtcgcatcgcagaagttttgaacaaggagaaaaacgcatgaaactgacccctaatttttatcgtgaccgcgtctgcctgaacgtgctggcggggagcaaagagaacgccagcgagatttatgaggcggcggaaggtcatgtactggtgggcgtgctctccaaaaattacccggacgtcgccagcgcggttgccgatatgcgtgaatacgcgcagcggattgataacgcgctctccgtgggactgggcgcgggcgacccgaaccagtcggcgatggtcagcgaaatttcgcgtcaggtgcagccgcagcacgtcaaccaggtatttaccggcgtggcgaccagccgcgcgctgctggggcagaacgaaaccgtggttaacggcctggtgtcgccaaccggtacgccgggaatggtgaagatctccaccggtccgctcagcagcggcgcgccggacggcatcgtaccgctggaaacggcgattgcgctgctgaaagatatgggcggcagttcgattaaatatttcccgatgggcgggctgaagcatcgcgacgagtttattgcggtggccgaggcctgcgcccgtcatgatttctggctggagcccaccggcgggatcgatctggaaaactacggcgagatcctgcagatcgcgctggacgcaggggtaagtaaaattatcccgcatatctacagttcgattattgataaagccagcggtcacacccgcccggcggacgtgcgtcagctgctttcgatcaccaaacagttagtaaaatagcgccgattatccctcacccggccctctccccaacggggagagggttagggcgaagggaaaccgccaccgaaccatcaaggagtcaccatgccaaccgctcgtcacctgcttgttgcttcactctctctgctcgccgccggcgccgctgcgcaaacccagtacgcctgggtcggcacctacaaccccaatggcgaagggctgtatcgctttaccgtcgatagccagaccggggcgctgcgcgataaaacgctggtcgggacgctgcctgacctggcccagcttaccgtctcggcggatggcaaaaccctgtacggcgccagcgaagtggaaaagggagtggtgcaggcgtggcgcatcggcagcaacggtgaactgagcgagctgaatcaggtcgcttccggcggcgccgggccggtttatctctccctgacccccgatggacgtcatctgctggtggcaaactacgtcagcggcagtatcgccgtgctgccggtgaaagaagatggtaacctgggcgaggcggtggatgtgcgtcaggatcaagggcctgcgggcgcggaacgcccggcggcagccgtcgaaggcagttttgccattagcgatcataacggcccccacgcccatatgatcgccgccgatcccagcggtaaattcgtttactccaccgatctcggcctggaccggatctatcagtaccggctggatagcgccacagggaagctgacgccgaacgatccgccgtttatcgcggcctcatctcccggctccggaccgcgccactttgtgtttacgccgcagggtgacggactatggttgattaacgaagaggcgtcgacgctcactttttatcatctcgataagcaaagcggcctgctgcgcgaggggaaaacggtctcggcgctgcctgcagagtataagggcaccagctttgccgccggcctggtcctgagccgcgatggcaaacagctgtacgtcgccaaccgactgcataacagtatcgcccactttacggtgctggctgacggcagcctgagccaccaggacgatatctggacccgcggcgactatccgcgcacgctgacgctggacagtcagggacagtggctgtacgtcatgaaccagcgtagcgacaacatcacccgctttcgcgtcgcgtcgaaggatggcaggctgacgttctctccggactacaccccggttggcagcccgtcgcagatggtgatatccgctcaaccctgagccgtaagaaaaaggaactgacatgcgatttccccatcaacgtttagcgcagctgtttactctgttgcaaaacgaaacgctgccgcaggaggagctggcgcagcggctgtcggtttctactcgcacggtacgcgcggacatcaccgcgctgaacgcgctgctgctgcactacggcgcgcagtttaacctcagccgcggcagcggctatcagctggtgattcacgatccgacgcgctatcagacgctggaagagagcgcgccgaaagcgcagcatatcccgcgaaccgcggcggatcgcatccactttttgctggtgcgctttttaacttccgcgttttctatcaagctggaggatctggccgatgcgtggttcgtcagccgcgccaccttacagggcgatatggttgacgtacgcgagcgttttcagcgttatcagctcaccctcgagacccggccgcgccacggcatgaagctgttcggcagcgaggtctccattcgcgcctgcctgaccgatctgctgtgggagctgagccagcaggggccgcttaacccgcttattggcgaagaggcgtttgacgccagcgtaccgacgctgctggccggcgtgctgcaggagacgttaacccgccatcacgtgcggctgacggacgcgggggagcgctttatctgcctgtacggtgcggttgccgtgcgccgcgtgagcgaagggtatccgctggccgattttagcgccgaggatgtggcgcaaaacgtacgcgacgccgcacgcgagctggcaaacacgatgcagcagctggcgggcaaactgcttgctccggcggaagaggagtggctgtgcgtccaccttgccgcccgccaggtgcaggacgtcgatccgggcaccatcagcgccgacgacgatgaagcgctggtgaactacatcctgcgctatatcaatcagcaatataactacaatctgctggacgatgcccagctgcatgcggatttactgacccatattaagaccatgatcacccgcgtgcgctaccagataatgatccccaacccgcttctggaaaatatcaaacagcactaccccatggcgtgggacatgaccctggcggcggtatcgagctgggggaaatatactccctacgccatcagcgaaaacgagatcggctttctggtgctgcatatcggcgtcgggctggagcgccattacaatatcggctatcagcgtcagccgcaggtgctgctggtctgcgataccagcaacgcgatggtgcggatgattgaagccatcctgcagcgtaagtatccgcagctggaaattgccgccaccctttcgcaacgcgaatatgaacagcgggaagagatcgcggaagattttgttatttccaccgtgcgcatcagcgagaaagagaagccggtggtcaccattgcgccgtttcctaccgactaccagctcgaccaaatcggcaagctggtgctggtggaccgcacgcgtccctggatgctgaataaatattttgatgaggcccacttccaggtgatagataccccgatggatcagcaggcgctgtttgccacgctgtgccagcagctgcagcaggaggggtttgtcggagcggagtttcatgggtcggtggtggagcgtgaggctatcgtcagcaccatgctcggtgacgggatcgcgctgcctcacgccctcggcctgctggcgaaaaagaccgtggtctatacggttatcgccccgcacggtatcgcctggggcgatgaaaccgcgcatatcatcttcctgctcgccatcagtaaaagcgagtatgaagaggcgatggccatctacgatattttcgtcacattcctgcgcgaacgggcaatggcccgccttgccgccacccgcagttttgctgagtttaaaacggtggccatggagtgcgtcagccggttttgatttttaccgtacggcccttcgccacgttttatgcatctgtcaccgttcacaaaatcatgccacgaccgtcgtcacctgtcccggaaaactaatttgaattaccccgccccatatgcagattaacttcgactgggcggtgagggcgggcatatttcccaccagcaccgttggcgaacccggcgcccacggcgcgggcgttgtcggaatacagggcatcggcgtcagcacaccgagcgccgcggcggtggcggcggcaaccgtcggattggcaatactgctgcacatcccgtacggcataatattcacaaacggtttgttatccataatattcgccatcggcatgttgctgacgagggtgcggcttgtgggcagtatgttcagcgtgccaggcgcgatgccaaatgaacactgcaataatgcgccggtacaaactccgggacagctcatggtaatacccccagttgccgccatagtcggcggacgatgactcgcggaataaactgatgcgcctttataaccttaagtgcccgtttattagtttgaacagatactacataaccaaagtaataaataaagcagatgcgttttttgattcacatcactatttataatttaacctgttaaagcgttaatatcagcgagaggttttcatcgatgtatattttgattggttgctttacatctaattgattttgattaattacttgtttttaatttgatttttatcaattttcactcggtgattggcagcgaataatttgattgatatttatttgtggttgtgtcttttatattgcttatggtcgccgtaaaaataccatttggatagtatggcgatataagtagcgctacgaatattctcgtaataagaaaggatgaatataggcgaagacgcttagcattaaagttattgtattagttcaatgtgcgtaaaaataacgggaatgtgaaaaaaaacggtgcgattcggctgatggcggaattgccgctaccggttgccgtctgattgataaggagtaacccatggatgtgatttttttaaagctcgacaatatcgaaggtgaaagtcaggccaaaggatttgaaaaacagcttgagatcatgaccttcagccataacgtggcgatgccggtcaccaacgacgtcagtaataatgaacgcacctcagggcgggcgcatgtcggtgaaatgtcgttgaccaagtttgtcgatctcgcgacgccaaagctcaatgagtactgctgtagcgggaaaatgattaaagaagctgtgctgacgttgtgccgtaatgataacggtaaaatgctgccattcatcatatataccctgacgaatgtcgttatctcacatctgagcgttagcggcggttccggcggcaagccggtcgaaacaatgtcgctgaactttaccaaaattaaatgggaaatcagcgctcagaaatcggatagtcagaaagaaggcaacgtctcttccgtttgggatatggcgacgaataaaaaaggtagctgagggtggaagcttcgcaccgcctgcctttccggtaaattataccgctataaaatcaagctacgtagcgccgggtatcaggtcgaggatgagtaggttatcgttcctgcgatcgccataggtcggtgcgatggtgatgatgtttatcatcaggctgaccggcgttagcgctgctgctgaaaaggagtttcctatgcccgaaaccaccataataaaactcatcgctccaaccttaaacggcctcaccgccgcgaccgcgcgcaccgaatcgcaacttaacggcctgaccaccgcgaccatcgccgctaccgcctctgcgccgttaacccttaataccacgctggcggcccatcttaccgccgccataaacagcgctgactacgacgggctgatcgccgaagcgcgcctgcttccggcaaacggcaacgctgtccgctatcagtttgtgctgcgcccgtggctgtggtggctgacgctcggcaacaacaaccgcgttttccagaacctcagcgcgcaggaaatcgtcgcgaaagtgtttaaggatgccggatttagcgactacacattccagctcaaaacccaaccccaaaaacgcgaatactgcctgcaatataacgaaagcgacttcaattttgtctcacggctgctggagcaggaggggatcttctggttcttcacccataaagaaggcaagcacacgctggtgctggcggatgataatagcgccttcccggccatttctggcggcaaaaaggtgaagtatcaggcaacatcaagcggcgcccgggaaaccgggatgattcgccaggtagagctgcgtttacaggccatcgcgcagggggcgcaccccggcaatgctcaatctgagcagccgaaacagcttatcgccgaaagcgactgcgcagcgctgatggcagggcactggtttaccctcgccgaacatgacgacaaagcattaaatatcgactggctcatcaccgccgtcagccatgaatatgacggtgaacgctatcgcaaccgctttaccgctatcccaaaagccacgccgtatcaaccacggtacgccacgccaaagccgtttatgcctacgcaaaccgcaacggtggttggcaaaaacggagaagaaaactggaccgacaagctcggacgggtaaaggtgcagtttccgtgggatcgggaaggcaaaaacgatgagaccagctcctgctggctgcgggttgctaccgcctggagcggcaacggttttggcgcgcagtttatcccgcgtatcggccaggaagtggtggtgagctttatcgacggcgacccggataagccgctcattaccggctgtgtgtacaacggcgcgaatgctctgccgtatgcgctaccggcgaatcaaacccagtccggtattaaaacccgcagcgaaaaaggcttcaacgaactgcgcttcgacgacaaaaaagatgccgagctgctggcgatgcaggcgcaaaaggacttccagctcaacatactgaacgacagtcacaccacgattagccacgatgaaattcacagcgtcaaaaacgatcgcacccgcaccatcgaagagggcaacgaaaccgtcaccctgaaaaagggcagtcgcacggtgaaaatcgacaagggcagcgacatgctggaggtgaaagagaaacgcagcgtaacggtgaagggcgatcaggaacacgccatcgacggtaatgagacgcataaggtaaaaggcaactacacgctcaatgttgacggtaatctgacgattaaggtcagcggcacgctcaccctggagagcggcaaaaccctggacataaagagtggggcgggtcttaacgccagcgcgtcaggcagcatgaagctggatgccgccagcatcgccagtgaagccaaatcctcactgacccagaaagcggcaaccatcagccaggaagctaaggctactctgaccagcaaagccagtgccacccagaccgttgacggcggcgggatgctggtgattaaaggtggtctggtgaaaattaactgatgaacgccatgctggtattaacgcaaatgatgtacaacctggttgctgctgccgcgccagattagcgccgggtcttttaagtcctgcacaaatttgccatcaaccagcacgttgatgagatccaccacctgcatctgcgcggcgttaagttcgtccagcttgtagccggtccacacccagatatctttgccggggcactcggcgcgaacgcgctgcaccagcttaaggatctccgggacgttctgcgggtgcagcgggtcgccgccggaaagcgtgatcccctggcgcttaacgcgggtatcgttgaggtcagcaataatgcggtcggccatctcggcggtgaacggcatgccggagtttagccgccaggtgctcttgttatagcagccggggcactcgtgaacgcagccggaaacgaacagggtgcagcgagtgcccggaccgttaacgatatctaccgggtaatattgatggtaattcatttttcgcttctcaattaacgccatagccgcgttggctgcgctcgctcaccccagtcacgtacttaatgtacgctcccggggattccctcgtttgccgccttgctctgacgcgaattgctttgcgaaaacggaggagctttgcatttgtaaagggaacggctcccggcgtcgctgcgctcggccgggctacgaagagccgcatacgcggttgtagcccggataaggcgctttgcgccgcgatccgggaacagctcctgagtggccggccggtcccctctcccggcaggggagaggattaggggaggggctaaaccacccggaattaaccgatctgcccgttgcccagatgcttcacgcggcgcttcacttcttcctgcttgccggcgttgaacggacgggcgtccgggctcccgagatagccacacacgcggcgggttaccgacacgcgggaggcatcgtggttgccgcatttcgggcaggtgaagcctttgctggtgcattcgaactcaccggtaaagccgcactcgtagcattcgtcgatcggcgtattggttccgtaatagggcacgtgctgatagctgtaatcccacacgtcttccagcgctctcaggttgtgctgaatattcgggtactcgccgtagcaaataaagcccccgttagccagcggcggataaggcgcttcaaaatcgattttatcgtacgggtttaccttcttctctacgtcaaggtggaagctgttggtgtaataccctttatcggttacgccttcgatcacgccgaactcagcggtatccagacggcagaagcggtcgcagaggttttcgctcggcgtgctgtacaggctaaagccgtagcccgtctcgtctttccactggtctaccgcttcgcgcaggcgctgaacgatggcgacgcctttctcacgcagcgctgcgctatcgtacatatgcttgttgccgaacagcgcgttgatggtttcatgaatgccgatatagcccagcgaaatcgacgcgcggccgtttttgaaaatctcagagacatcgtcgtccgctttcagacgcacgccgcaggcgccttccatatacagaatcggcgccacgcgagccttcaccccttccaggcgggcgatgcgggtcatcagcgctttacgcgccagctgcaggcgttcgtcgagaagtttccagaactcagtctcgtcgccacgggcttccagcgcgatgcgcggcaggttgaggctgataacgccgaggttgttgcggccatcgtgcacctgttcgccgtcctcgttttcccacacgccgaggaagctgcggcagcccatcggggttttgaacgagccggtcaccttcacgacctgatcgtagttaagaatatccggatacatgcgcttgctcgcgcactccagcgccagctgtttaatgtcgtagttcgcatcgccgaacttgtggttcaggccgtcgcgaatggcgaagaccagcttcgggaataccgccgttttacggtttttaccgagtcccgcaatgcggttgcgcagaatggacagctgaatcagacgcgattcccagctggtgccgaggccgaaaccgaaggtcacgaacggcgtttggccgttggcggtatgcagggtgttcacttcatattccagcgactggaaggcgtcgtagcactctttctcggtgcgggaacgggcgtagccttcggcgtcggggatgtgccactcttcggcaattttacggtgcttattgaagctttcggtaacaaacggcgccagtacttcatcgatgcggttgatggtcgtaccgccataaatatggctggcgacctgagcgataatctgcgccgtcaccgcggtagcggtagagatcgacttcggcggctcaatctcggcgttgcccattttaaatccctgggtcagcatgcctttaagatcgatcagcatgcagttgaacatcgggaagaacggggagtagtcgagatcgtgatagtggatcacgccgcgctcgtgggccatgaccacgtcatgcggcagcaggtgttggcgcgcgtagtgcttggcgacgatgcccgccagcagatcgcgctgggtagggatgactttactgtctttgttggcgttctcgttgagtaacgccgagttggtctgctcaaccaggccgcgaatttcctggttcagacgaccgcgcttttcacgttgactatcgcggtcgtggcgatattcaatgtaggcgcgcgccagctgcttgtagggaccggacatcagctggttctcaacggcggtctggatctcgctgatatccacctgagcgcggccctgcatttgctggctaacgacttctgcgacggtggcgcaatagtctgcgtcatcgactcccgctgctttagctgcacgtagaattgcttcattaatgcgctctgacttgaacggcactttacagccatcgcgtttcatcacatgcggtgtcatgatcactccataattttttacagaacaggttatccacagaggcggaaggtcaaccgaagccccggggcgctgtagctgccgccgtttccctccgatcctggccctttttatccacatcccatcaccgcctgagtacgatgggagtggtgatataatagactattaatacaatatgtggggccggaatgcattttaagttctatatgtagtgctttgcatcaaagatgtttgcaattttattgatgcagaacaaagtaaaaagaggagagcaggaatgatgggcgcttgcgcttaatgtaaatttatccgcttataaaataagcaaaaatgggcccttaacgcaggaaattcaggcccaaaaggaataacgtcaggcgagcagcgcgtcgttaagcaggtcaaccagcagcagcagggcgtaacgcgcggcctgagcattctcaggcaggggcagcagcgcggaggccatattgctcaacgcgtggttggcgggggtgagggcgaaaattgtcgcttcctgtacccgggccagcagggtcgcgccctgcaaaatcgcgtcggcctcgccggttgccagcaccagcaggagatgatcgtcgctgagggtactggcgatcatccgcatcagggcgctgtcctggcagagattcatcacgatcccgatggagagtagctggtgctgaagcagcgtcgccagcgcgatgtcctgtgcgccgagggcgaaacagtgtacggcgcgggcattttgcaggcgcgtgcgcagcttttgcagcgttgattcgggcgtgctcaccagctgctgctcaagatgtgtgctaatcaggcttaatttgtcgcgccacgcggcgggcagcgcggcgctctcctcgttaagccagctggtacgacgttcgcaagcctgcgccagctgctttcgcaaatcacgaatatcctcgcagccgacggagcgggcaaagcgggtaattgtggctgcgctcacgccagcgcgcaccgccagttcatcaatcgaagcgctggcggtaaaacttaaattctgcagaataaatgccgcgactcttgattcctgagcgctaaagcgagtcatgccttcctgtaactgtcctacgatatccatgctttcagcctctttctccgccaccgcctgattgaaaatatttttcaattaatgagggctttttataccacgcaaccacgcacaatgcctgagattattgccaatttctcttttatgccggagtaaagaggtgaaaaataacgctccgatcacgtacgtgaaaaaaattttcatatagccttcacccataccggcacctcgtcttatagtcgatggtgtctgtttagcgctcgcttacgccaaatccattgggaggaattatgccacgtatcgtcctgtgctgcgccgccggaatgtccaccagcatgctggttaacaaaatgaaggccgaggcgcagcagcgcgcgctggggctggagatttacgccgtacccgtcgccgagtttgagcgcgagttgcccaatgccgacgtgatcttactggggcctcaggtgaagtatgaagcggcccgattgacggagcttgctgcaccgcacgggaaagccgtggcggtgatcgacatggcggattacggcatgatgcgcggggccgccgtcctcgataaagcgctcgctctgctgaactcctaaccctttcccatcaacgcgttcatttcgcaacgccgctgcggccttgcgcggggatctgtacgccaaaaatgaggccactatgcaaacattgaaaattgccgtcatcggcggcggcagcagctatacgccggaacttatcgaaggcattatccttcgccatcagcagattccggtcacggaactggcgctggtggatgtcgaagccgggcgcgagaaagtggcgattatcgccgcgctgacccagcgtatgctaaagcgccatggccttgaacaggtgaaggtcagcgtgcatttcggcctcgatgaggccattcgcggcgctcaattcgtgctgacccagctgcgggttgggcagctggcggcgcgggcggcggatgagcggttggggctgaagtaccatctgctgggtcaggaaaccaccggcgtcggcggctttgccaaagcgctgcgcacgattccggtgattttacaggttgcccgcaaggtggaagcgctggcgcccgacgcctttatccttaattttaccaatccggcagggatcgtgacggaggcggtgagccgctacagcagcgcgaaaatcatcggcctgtgcaacgtgcccatcaatatgcagcacatgattgccggaatgctggacgcaaaagaagaggaggtccggctgagcttcgccgggctgaatcatatggtctgggtacacaaggtgatgcaggggcgggaagaggtgaccagtaaggtcatcgacatgctgtgtgacggtcaatcgctctcgatgaacaatattcaatcgctgccgtggccggcggagtttctgcgggccctgaaggccatcccctgtccctatcatcgctatttctggctgacgccggcgatgctggcggaagagattgaggcggccaaaaccaaaggcacccgcgcggaacaggtgatgaaggtggaacaggagctgtttgatatctatgcccggcccgagctggatgaaaagcccgaacagctgagcttccgcggcggggcgtactactccgaagtggcggtggagctgattaacgccatctacaacaatcttggcaaagagatggtcgtcaacacccgcaacaacggcgcgattcaaggcttcgatgatgatgcggtggtggaaattaacagcattattgacgcgcagggcgcacgaccgctggcctttggcgcgctgccaccgatcatgaacggtctgacgcaacaggtgaaagccttcgagcgcttgacgattgaggccgcggtccacggctgccgggatagcgcgctgctggcgctggtgagtaacccgctggtcgggaatgtgaccgatgcccgggcgctgcttgatgaggtgttaaccatcaaccgcccctggttaacgcagtttaactaaacttttccgccttcggggataccactatgtctcgtacttcatttattgaacgctatgtcatgcccgccgcgctgaaaatcggcggtcagaagcatgtcctgtcggtacgcgacggcattattctcaatatgccgtttatgctgattggctcgtttttcctgatattcgcctacctgccgattcccggctacggtgagatgatgaccagcgtgtttggcgatgcctggcgcgataagatgctgtacccggtcaaagcgacctatgacatcatggcgctgctctccgcgttcggcattgcctaccggctggcggaaaaatatcgcaccctggacccgctcagcgccggggcgatgtcgctggtggcgtttgtgatgacgatcccccaggtgacgctctttacgccggcagacggttcggcggcgcaacttgtcaaaggcgtgctgccggtggggatgattggcagccaggggctgtttgtggcgattgtgatttcgctgctttccacggagatctaccgcctggtggccagccgtaatctggtgatccgcatgccggagggcgtaccgcccgcggtggcgaaatcttttctcgccctgatccccggcttctgcgtgctggccgtggtgctggcgctgcgcctgatcgttgaagcttcgccgttcggtgatatcaatagcatgattaccacccttatcggtattcccatgtcgcacgtcggcggttcgctgccggggatgattatctcggtgatcctgattggtatcctgtggaccctggggctgcatggcgacaccattgtgctggtgtttattcgcccggtctggctgtcgaatatgtcggaaaacctggaagcgtttcagaatgggctgccgatcccgcatatcatcacccagcagttttatgacctgtggattgcgcccggcggtaccggagcgctgctggggctggtgatttttatgctgctgcgcagccgtagccagcagatgaaacagctggggaaaattgccgcgccgggagcgctgttcaatatcagcgagccgatggtattcggcattccgctggtgatgaacccgtacttcttcctgccgtttattttgacgccggtcctgctggtgattgtctcgtataccgcgatggccaccgggctggtgatgaagccggcggggattgcgctgccgtttaccacgcctatttttatgagcggctatctggcgacgggagggcatatttccggcgcggtgctacaggtggtgaacctggcgatctcgctggtgatctactatccgttcttccgggcatgggatcgcctgaaggcgaaagaagagcaggcgtccgcgcagccggaagccagcgcgacgctgtctgcggccgatcgtatttaaagcatattcccggaggcggcgcttgacgcgcctgtccgggctaccggctcgcagaagatggtgaacccgtagcccgggtaagcgcagcgcgacccgggactctcagcgcaagccgggtagggggttacgcctgcagccaccataccgcttcaaacggacgcagggtcatatcggcagggcggttcgccgcctccgcgtagttgctcatcagcatccgccagtcgccgctcatcgcttccggctgccagcgctggaactcgcggctcaggttcgccacgaccaccagggtttgcccctgccactgacggcgatagcaccacagcgacggatgttccggcagcagatcctgatagtcgccccaggtcagcaccggcgtgctcttgcgcagcgtaatcagctgctgataggcataaaataccgattccgggtccgccagcgccgcctcggcgttaatctcgcgatagttatcgcacagcgcaatccacggctcgccggcggtgaatccgccgccctcaccgctgttccactgcatgggcgtgcggctgttatcgcgcgatttgctggccagaatcgccaacagttcatccgcatcccggccctgcgccgcgcgttcgataaacatgttgtggctctcaacgtcgcgataatcggtgatgcgcgtaaagtgcgggttggtcatgccaatctcttcgccctgatagatatagggcgtgccctgcatgccgtgcagcaccatcgccagcattttcgccgccgggacgcggtactccccctcgtcgccgaagcgggagacgatgcgcggctggtcgtgattacaccagaacagcgcgttccacgcgcgattgtgcatcccctgctgccagtgcctgaacagcgatttcaaggccacaaaatccgggcgcgccagcgtccacttctcgccgccgggatagtccaccttcagatggtggaagttaaaggtcatcgatagctcgctgccgtcgagcgccgcgtacttctggcaatgctcaagcgtggtggaggacatttcgcccaccgtcatcaggttgcgcggggtaaagacatcgcggctcatctcctgcaagaattcgtgcgctcgcggaccgtcggtatagaagcgccggccgtcgcccgcggtatccgacgggaaggtctggtctttggagataacattgatcacgtcgaggcgcaggccatcgacgccgcgatcggcccagaattcgcagacttttttcagctccgcgcgcaccgccggattttcccagttcagatccgcctgctcgacggcgtacagatgcagatagtactgctcgctttcggcgtgccactgccaggcgttgccgccaaacttagattgccagttgttcggcggcgtggtcggttcgccgtcgcgccagatatagaactgacgatacgggctctctttgttgagcgcttcgcggaaccaggcgtgctcggtcgacgtgtggttcagcaccatatccagcacgatacgaattcctcgcgccttcgcctgggccaccagctcgtcgaaatcgtcgagcgtgccgtaggcgggatcgatagcggtatagttggccacatcgtagccgttatccacctgcggcgagacgtaaaacggcgtcagccagatagcgtcaacgccgagcttttgcagatagtcgaggcgggaggtcacgccgcgcaaatcgccggtgccggtcccggtggtgtcctggaaactctttggatagatttgataaataacgccgttttgccaccagaggggaagggtattcatattgcgttcctgctacaaaaaaggggggcgacagcgcgccccgaaaataagtcgtcagacaatctgtaaggtgccctggcggaatttgcgctggtaaacaaccgttgtcaggacaatcggcacgaccacggcgatagccatcgccagcgcgtaaacctgccagtaggttggctggatagagagaatgcccggcaggccgccgacgccgatgccgttggccatcacgccgttcaggccgcacagcagcccggcaagaccggagccgaccatcgcgcagagcatcgggaagcggtatttcaggttgatgccgtacatggccggttccgtgacgccgaggtaggcggaaatggcggccggaacggagatttcgcgttcgttctgtttacggctggcgatgatgatacccaccaccgccgacgcctgggcgatgttggacagcgcgatcagcggccagaccggcgtaccgcccatgctttgaatcatctgcatatcgatggcgagcgtggtctgatggaccccggtaatcaccagcggcgcgtacaggaagccgaacagcgcggcgccaatcggcgcgaagctgccggttaacagatgacgcacggcccaggccacgccgtcgccaatcatgcggccaaccgggccgataaaagcgtgggcgagaaagaccgccaggatcagcgaacagaccggcacgatcaccagatagaggtagtcaggcacgatgcgtttcagccgcgtttcgataaagccgagcgccagccccgccatcaaggccgggatcacctgcgcctggtagccgactttctcaatggtgaacaggccgaagttccatacttccggcacctgctggcccagcaggtaggcattcatcagctgcggagaaactaacgtaacgcccagcacgatgccgaggattggcgtgccgcccattttctttaccgcggaccagcagatacccaccggcaggtagaagaagatcgcctcgccaatcagccacaggaagtcataaagggttttcagcgacgggtgcatctgcgccagcgtctggccgttgctcatcggcagatcgccgatcacgttgcggaagcctaagatcaggccgccgctgatcagcgcaggcagcagcgggaagaagatctccgcgaagtgtgaaatgagctgttcatgccacttcatattctgccgcgcggctttcttggcttgttctttatcggcgctggcctggccggtggtcgccagcagcgctttatagtagtcgccaacctcggtaccgatcaccacctggaactgcccggcgttggtaaagcagcccttcaccatgcggagctgttcaatttctttcggtttggcaatggctggattattcagcacaaagcgcagacgggtaatacagtggctgacggtggcgatattgtcgcgcccgcccaccagttcgataagtttatcgatgtcctgctgattcactttactcatgatgaggcctcatgaccgaggggagaggttgcatttaacttgcattggatcctactcgctccgtttgaattgcaaaatgggaacgttcccgaaacccagcgaagatcacataaatcgttaagacaggcttaattcagtacggcgggaatcacgatttgacggggttcacggtttccggcgatctgctcgatcagctgctgcgccgcctggcgtccggactcggcgtagccgggatcgaccgtcaggatctccgggtggagaaacttcatcagcggcgtgctgccgacgctggcgagctggagacgatcgattccctgctgctggagatatttgctggctcccagcgcgagggtatcggtggcgcagaccagcgcgctggtttcagccgacagcacgccggcgacgttttcatacccctgcttcatgcccaggcccggcagcgcggcgaggggcgtgaggtgttttttctggcagaaatcgaggtaggcctggtggcggcgctgcccggtggtgatgtcgctgtgcggcacgccgaggaaactgatgtggcgatgcccgcgatcgtacaggcgctgcatcagcatcctgatcgaaccttcatcgtcatagcagacggaggcgatgcccggcgcgtcgcgggccagcagcaccagcgtctctcgccacggggtgagcatctcttcatggatgccggtgaaaccaaacagcaccacgccgtcgatattgcgccgggcgagcatgccgagatgctcctcgaccagcgccggggagaactggctctccatcataatcggatcgtagccctgagcgtaaaaggcgggaagcatggtctgtacggcgaggttttccgatagcgaatccagacgggtgacgatgatcgccaccactttatcgctctggccgcgcatcgccctggcggaacgtgagggcgaaaacccgtgctgctgcatcaccgcttcaacgcgctcacgcgtgcgttcgctgacgccgctttcgttgttaagcacgcgcgataccgtcgatttcccgacgccgcttaagcgtgcgatatctttgatggtcagccggttttgcatgcagggttctcgttgtggtccgcttaaagtgagcctaatgctactcaacgaaaccacaatgagcaaagtctggtttacgtctggtttagttgcccgggggtattatcgccataatagccacaaatagattatcggcgacggtataattcgcgccgtttgtattcatttaccggagattttatggaccccgatcccactcctcatcctcgatggagcccccttattttccggtaaatctgcgtagcgctgctttaccggaagcgtaaagcagcgatgtctttgacgtccctgccataaaaataacatgcctgacaggtaaggttgactcgcgcctgtcggtagcctgcgttcgctcgcgcgagcgcggagggactgtttatgtttaaaaattttacccgccagctgtttgcccagcttggtcgtcatttaccgcgtcgtttagtacaacgcgatccgctacccgatgcccgcaatctggcgagcgcgccgatcccggactccctcggcaagcagtgcctggacgtggcggcaatggatgagaatgaaatctggcgcgccttcgccagccatccggaagggctaaatgcgggcgaagtggcgcagaaaatcgcgcagtatggcgaaaaccagatcccggcgcagaagccgtcgccgtggtgggtgcatctttggagctgctaccgcaaccccttcaacctgctgctgaccgttctgggtatcgtctcctactcaacggaagatctgtttgccgccgcggttatcgccctgatggtggggatctccacgctgctgaactttattcaggaagcccgctcgaccaaagcggcggacgccctgaaggcgatggtcagcaacaccgcgacggtcctgcgggtggtgaacgagcagggcgagagccgctggtgcgagctgcccatcgaccagctggtgccgggggatatcgtcaagctatcggcgggagacatgatcccggcagacctgcgcgtcattcaggcgcgcgacctgtttgtcgctcaggcctcgctgaccggtgaatcgctgccggtcgaaaaagtggcccgcacccgcgacccgctgcaggcaaacccgctggagtgcgacaccctgtgctttatgggtaccaacgtggtgagcggttcggcgcaggcgattgttttcgctaccggcggcggcacctggtttggccagctggctggccgcgtcagcgagcaggaaagcgagccgaacgcctttcagaaagggatcagccgggtcagcatgctgctaatccgctttatgctggtgatgaccccgatcgtgctgctgattaacggctacaccaaaggcgactggtgggaggcggcgctgttcgcgctctccgtcgcggtgggcctgaccccggaaatgctgccgatgatcgtcacctcgaccctggcgcgcggggcggtgaagctgtcgaaacagaaagtgatcgtcaagcacctcgacgcgatacagaactttggcgcgatggacatcctgtgcaccgataaaaccggcaccctgacgcaggataaaatcgtgctggagaaccacaccgatgtctccggcaaggtgagcgaacgcgtgctgcatacggcatggcttaacagccactatcagaccgggctgaagaatctgctcgataccgcggtgctggagggcgtcgagctggagtcagcgcgcgggctggcggaacgctggcagaaagtcgatgagatcccgttcgattttgagcgtcgccgcatgtcggtggtggtgcaggagcaggacaacgtccatcagctaatctgcaagggggcgctgcaggagatcctcaacgtctcgacccaggtgcgctataacggcgacatcgtaccgctggacgacaccatgctgcggcgcatccgtcgcgtaaccgacaccctcaaccgtcagggactgcgcgtggtggcggtggcgacgaagtacctgcccgcccgagaaggcgactaccagcgcgcggatgaatccgacctgatccttgaaggctatatcgcctttctggatccgcctaaagagaccacagccccggcgctgaaagcgctgaaggccagcggcattacggtcaaaatcctgaccggagacagcgagctggtggcggccaaagtctgccacgaagtaggtctggatgcgggtgacgtggtgatcggcagccaggttgaagcgctgagcgatgatgaactggccgagctggcaaaacgtaccaccctgtttgcgcgcctggcgccgctgcacaaagagcgtatcgtgactctgctgaaacgcgaaggacacgtagtgggatttatgggcgacggcattaacgacgctccggcgctgcgcgcggcggatatcggtatttccgtcgacggcgcggtggatatcgcccgcgaggcggcggatatcatcctgctggagaagagcctgatggtgctggaagagggggttattgaaggccgccggaccttcgccaatatgctcaaatacatcaaaatgaccgccagctccaacttcggcaacgtgttcagcgtgctggtggccagcgccttcctgccgttcctgccgatgctgccgctgcatctgctgatccagaatctgctgtacgatgtatcccaggtcgccattccgtttgataacgttgacgatgagcagatccgtaaaccgcagcgctggaacccggcggatctcggccgctttatggtcttctttgggccaatcagttcgatattcgatattctgacgttctgcctgatgtggtgggtgttccacgccaacacgccggaacatcagaccctgttccagtccggctggttcgtggttggcctgctgtcgcagacgctgattgtgcatatgatccgtacgcggcggatcccctttatccagagccgcgcggcctggccgcttattgtgatgacgctgctggtgatggtagtggggattgcgctgccgttctcgccgctggcgggctacctgcagcttcaggcgctgccgctcagctacttcccatggctgattgcgatccttgcgggctatatgacgctaacccagatggtcaaaggcttctacagccgccgctacggctggcagtgagcgaggcgctttacgtgcagaaacaacaaaggcagccccgggctgcctttgttcatactgtctacgattagcgacgaatggcgatcgcttcaatctcaatttttacgtctttcggcagacgcgccacttccacgcaggagcgcgccgggaaggtggcgttgtgctcggtgaagaaggcttcataggtggcgttaacggtggcgaaatcgttgaggtctttgacgaaaacggtggttttaacgatatcgcccactttcaggcccgcggcttcgacgatagctttcacgttctccagagactgacgcgcctgagcggcgacatcttccggcacgctaccggttttcgggtctaccgggatctggccggaagtgatgatcatgttacccagatcgacgccctgaacgtacgggccgatggctgctggcgcattttccgtcgcgatagttttagacatgagttctcctgaaatatgtgaatgtaatctgactggcgtgggtcattataaagagtgctggctgctttatcattaagcaggccgcattttgcgaaggagaaaagcggataacgcagcgcgctatccgcataaggcgtgagcctgaaggatgaagttagtgggtgacttccgtccatgccatggcccagtcagaacctgtgcccggttcgaactgagtggcgtactggctccactgcacgcagtagccgctgtaggggaacgggcgacattggtacactttgccgtttttaggctgcatgactttcgttcccgccttatagcttttcaggttatccgggaaggtatagtcgtagtttcccgcaggcgcaggcgtcggggtcggatccggctgaaccgtactctcttccagcatcaggtcaatgaccccctggctgagggtggcgccctgcgcattgctggcagagtagcgcagcatatgatgacctgcctgaacgttggtcagcggaatagataccgtcagggagcgattatctatcgtctgctgaatgctccctttctgcgtgcccgcatggtcgttgacggtggcggtgagatgcattttgcccctggccgtggcgttgaacgtcaccgtcgctttcccgttggcgattttggttgcgttaacgttggcgacgctcagggattcttccacgatatcgtctgactgcgactcggcgtaggtcagcgtaacgctttgaacggtgctgtcttttggcacatacacctggttaacgccgtggaggggggtaatgttgccatcactcccttttaccccggcgcgcagcttaccctgatgcgcggtattaatagcttcagccagatcgtaagaccactggctgctttttccttgcgcttcgctggcgatggtcaattccgtttgcagagaatgaacttcaccgctcgcgttaaagaaatgggcaatgactttatctcccgcatggagatctttcccgctaagctggcctgcgagctgcgtagtccagagggattcattctccgtttcatcgctggcgccgccgaaatcaacgtcaatggcctgataaaaactatttgccgtatcggcaatttcccagacggcataaataacctgatagccggtgcgatcgggtacattacaggagtgcgtgacctgtacagccggcgtcgcgccattaccgtcgatttgacaaaatggcttactttcaaaatcgctgcgcgtcagcggcttattttgatcccagttctgtttggtaatgtaataacgccagttagtcgttctatgcggcgcagaatggtgccagacgaaattatttttaccgctctttatcgtggttttcgcccagcgagtcgggctctggctatccagctgcgagaagttgcttttacccgcgctggccagtttaccatcaggcggcattgccccttcaggaaaaccgctcgcttgctcgacgctttgcggttcccactgcaccgaaccgcagtcggtgtttttccctaaatgacattggtacgcccgacttggcggcgattccacatagccgtgagccaatgctgaggaggtaaataataatgttgctgtatataacgatatttttttcactttcataattcatcctgtgaacattgattaaaaaaatagaaaacgcactggagtgtatgaagggaaaaattcaggttcaatagcagtgatatttaatgattaatctcattgtttgttatttttaatcatgagacgtgttgatgagaaattgatgaatgttgattatctgacccgaggtcagtgagttgacggccgtgcggatgatttaaattatcgttcaggagcagtcccgcttatcgggctgctcccgataaaacctggcgaatttaatttgccagcacgacatgatgtgaaaattctttttcacaatatttgcacttcagcgcgatatcgttttcgcgtttcttcaccgcaaagctggaggacaccggctcggcgtggctaatacagttgctgttcgggcataccagcacgttgttaatacggtccggcagattcggtcgggatttaccgacgacttcatactcatcaatgcggtttaccgtggcctgcggcgcgtacagggagagctggttgacctgctcgtcggtcaggaaggtgttctcaattttgatcaaatctttgcggcccatttcgcctgacggcaggttcaggccgatggtgatgcgctgatccgtttcggtcagtttgaacagggtcagcagcttaaagccgacctgcgccgggatatggtcgataacggtgccacgtttgatggcttctacctgtaatttattgtcgtgtgtcatctcttttccccttacagtgccagatcgctattcagtaccagcgccagtaacgcctggcgcgcgaagatgccgttgcccgcctgctggaagtaccaggcgtgcggcgttttatcgacgtcggtggtgatttcatcaatgcgcggcagcggatgcagcaccttcatgttcgcgcgtgcgccttccaggtctgcggcgcgcaggacgaactgcgccttcacgttggcatattccgacgggtcgagacgctctttctgcacgcgggtcatatacagaatgtccacctcttccatcacctcttcaatggcgctatgcaggctccaggcaatgcctttttcatcgagcatgtcgaggatgtactgcggcatggccagcgcgtccggggcgataaagtagaagcggttgccgttaaatttcgccagcgcctgggtcagggagtggacggtgcggccatatttcaggtcacccaccatcgccacgttaagattttccagacgaccctgggtctcctgaatggtgaacagatccagcagggtctgcgtcggatgttggttcgcgccgtcgccggcgttgagtaccggaataccgccggaaaactcggtcgccagacgcgccgcgccctcctgcgggtggcgcatgacgatggcatcgacataggtgctgatgaccgagatggtatcggccagggtttcgccttttttgcccagcgaggtgttgctgctgtctgagaaaccgaccacgctggcacccaggcggtgcatggaggtctcaaacgacaggcgggtgcgggtcgacgcttcaaaaaagcagctggcgatcactttatgcttgagcagctccggctgcggattggctttgagttttgctgcggttgccagtaccagttcaaggtcttcgcggctgagatcgtttatggaaatgatatgtttttgatatagcgggttagccatgtttatctcctgacgcctgggcaaaaaaaaagccccttaaataaggggctttacgaatacggatgcaacggaaagaaaaaacggcaggccagcgtctgttttcagacgcggtaagacgcgatgtcgtacacactgaaccataattcctcccggcaaaacgggtggcattatacgcagctcatatttcggatcaagcgattaatccacaaacaggtaaacgtttgcctggggaatcatgcgttaacgcaaaaaacccgcaaaaagaggtggtatggcagtcggatggggggtataaacgcgaaatgaaaagctgttttatatttgagggctattatgatcgttggaaatattcaccatctgcaaagcggattgccggcgtctctgcgtgaggcgatcgaacatgttaaagcgcatgtcaccgacgcgacgccgctgggtaaacatgatattgacggcaacaacctgttctatctcatttccgaagataccaccgagccgatggccgaccgccgcgccgagtatcacgcccgctacctggatatccagattgtactgaaaggccaggaaggaatgacctttagcgttctccctgccggcgcgccggatatcgactggctggcggagaaagacatcgctttcctggcggagggggcgcaggaaaaaaccgtcatcctcagcgaaggcgactttgtggtgttctatcccggtgaagtgcataagccgctgtgcgccgtcggcacaccggcgaaggtgcgcaaagcggttgtgaagatgctgatggcgtaaaaaataccccgggctgcggctggcgccttgcccgggctacagatccgcgcggtttgggggcgggtagcccggataaacgcagcgcaatccgggggaatatcgcgagaacgcttacttacccagcgtcgccaccatcaccgctttgatggtatgcatgcggttttccgcctggtcgaaaacgatgctcgccgcggattcaaatacctcgtcggtcacttccataccaccgtgcaggccgtactccgccgccatctgtttgccgagcgtggtctggtcgtcgtggaacgcgggcaggcagtggaggaatttcacctgcggattgccggtcagcgccatcatctcgctatttacctgatacccgcgcagcagcgcgatacgctccgcccacttctctttggcttcgcccatcgatacccagacgtcggtatagataaagtccgcgcccttcacgcccgccgcaatatcttcggtcagcgtaatattgccgccgtttttctgcgccagcgcccggcactgctcgaccagcttctcttccggccagcaggcggttggcgcgaccagacgcagatccagcccggtcaacgcggcggcttcgagcatggagttgcccatattattccgcgcgtcgccggcgtagaccagggtcatctgattaaaggctttgcccggcagatgctcctgcatggtcagtaagtccgccagcagctgggtggggtggaattcgttggtcaggccgttccataccggaacgccggcatactcggccagggtttcaaccacttcctggccgtggccgcgatattgaataccgtcgtacatgcgccccagcacgcgggcggtgtctttaatcgactctttatggccaatctggctgccgctggggccgagccaggtgacgcgagcgccctggtcaaatgcggcaacttcgaaagagcatcgggtgcgggtagagtctttttcgaagatgagcgcgatgtttttgccggtgagatgctgaatttcaatattgtttttcttatcagctttaagcctggccgccagctcaagcagagcggtgatttcggcgggggtaaaatcgagcaactttaaaaaatgcttctgataaaacgcggacatggttccctcacatggctcaagccatttgttgaattaaaattcactttatatgtatgaatattcatttgcaaccccgtgtcataaatctttcgctcagaaggtggaggcaatcacggcggtatgtgacaatagaagcatccgcgacacattatgaggaacgagccatggcaaacccggaattactggaagaacagcgtgaagaaacgcgcctgattattgaagagctgctcgaagacggcagcgatcctgacgcgctgtacaccattgagcatcatctctctgccgatgatttcgaaacgctggagaaagtggcggtcgaggccttcaagctgggctacgaagtgactgagccggaagagctggaagtcgaagagggcgataccgtgatttgctgcgatatcctcagcgaatccgcgctgaatgccgagctgattgacgcccaggttgagcagctgatgaccctggcggaaaaatacgacgttgaatacgacggctggggcacctactacgaagatccgaacggggaagacgaagaaggtgacgacgacgaagatctggttgatgaagacgacgacggcgttcgccactaagtagcagaggtatacggcggtgcgatatgccgccgtatagcaaggaattttaatggattacccgcaaatactcgccccgattttaagctttctgcattgcccaactcctcaggcgtggattgatgaagcccgtaaaccggaaaacctcccgctgctgttgaccgaccatatggtgtgcgagctgaaagcggcgcaaaacgctatgctgctggtgcgtcgatacgtcgcggataaagcggacgcggatgagctgctggcctgcctgaagccgtatgaggacttcacctaccgctgggggccggagccggatttcgtcgcgctgcataagcagataaataaaagcgccatgccgcagaccgacgatccctggggacgtcagctactcgacagcatgattctgctgatcaaagaggagctgcatcacttctggcaggtgagggaaatcatgctttcccgcgaaatcccgtacgtcaaaatcaccgccagcaactatgcccgcgggctgcgccgggaagtgcgttctcacgaaccggtcatgctgatcgataaactcatctgcggagcctatattgaagcccgctcctgcgagcgttttgccgcgctggcgccatggctggatgacgatctgcagaagttttatctgtcgctgctgcgttccgaagcgcgccactatcaggactatctggacctggcgcagagaatcgcccaggacgatatcagcgaacgcgtgcgccagcttggcgaagcggaagcggcgcttattaacgcgcctgaagcggagtttcgttttcacagcggcgtgcccgcctgaacgtcaggccgccgcttcaccgcagcggcctgacgatccattacagattggcgtttttgtctttctctgccgtcgcggcggctttgggcgcgccgagggtcgctttaaaccagttcaccacccgttcaataaccggcttctgataccagctgtcatcgccgtgctccgcgcccgccagcaacacgtaatcggccgggttgccctcctttttcagcgcgcgatagagctgttgactttgtaccggtgaaaccagggtgtcggcgctgccgtgcataattaaaaacggcggctttttaccgctgatatggcccatcgggctggccgccagggctttttgcggatcgctgtcaatcgtcgctcccggccagtcgcgaaaggcgctaccgtgtaccagcagcgcttcagtgaccgccggcgactggtgcactttttgaatcgcctgcggaaaaccttcgccgatattcaacaggttcgagataccgtacagcgtggcggcggcctgcacatccgaggattgtgccaggttatcgccacgctcgaacgttttgtcaccgttggtgagcgccagcatctgcgccatatagccgcctgcggaatcccccagcacgccaatacgcgacgggtctataccgtattccgcggcatgttcgcgcagatagcgaacggcggctttaccatcgataaccggggccggaaaggtgtcgggaaccgtacggtattccgccgccgcgacgacgaatcccgccgccgccagcgccatacgcatctcgataaacttattccaggccgcgctggtgaaaccgccgccggggaaatagatgattgccggtttcagatcgccgttacgcggtaccagtaaagacatatgcagctgacgaacggcgacggtgctttttacctggctataaacgatatcgttgagcgcatcgatacggccccgggttttttccacgcgaatgacctgagcgccttcggtattgccagcaagttcgccggcgttaacgcaggaagccatgccggcaagcagcaggccgccggtgagcaggagggggagttttttcatgatgttctatcctgagcaaagcctgccgcggcggcaggcgaaaagatccaatgctcgaagagtgtattagcgaaaacgggcggtgaataacgctctttttgcatgaaaaccatgcattttttcgattaatcaacgtcgccgttttgcgggcgctacagcactttcaacatcctgacttcgcagtcaacgtggccggtgcagcccagcggctcagcaatatgctcgaagccgaggtgctcatataaaccgaccgcttctttcaggaaggcggtggtttccagatagcagcgtttgaatccctgctcgcgggcgtaatcaagggccatcagcgccagctttttcgccagcccctggccgcgcgcggaggtcataaaatacattttttgtagttcgcagatatcgggctcgctgcaggagagcggtgccacgccgccgccgcccaccacttcaccattctgctcaacgacccaataggcggaacccggctggctataaagctcatagagttcatccagattcggatcggctaccgtatagcctttgtcggcggtcagaccatattcagcggagacctggcggataacagcggcaatcgccggattatcattagccgtgatgcggcgcagggttagcggtagggttgcgctcgtattcatgtgaagactcattgcaaaataatgacggataatgttgttaataacactgcgggaggggagagtgcaagcgaggatctttcacagaaaacgccccttatccgaatggataaggggcgagtgaattacagcgcggcgataatcgcctgctgctcaatcagcttcgcttttgcttccgcgtaaccttccagcttctcacgctctttggcgatcaccgcttccggcgcgcgcgccacaaagccttcgttggagagtttgctttcgatgcggccaatctcgccttcgattttggtcacctctttagcgaggcgcgccagctcatcttctttattgatgaggccagccatcgggatcagcagctcggcgccgtcgataattttggtcacggaaaccggacctttatcatcggcaggcagcacggtgatgctctccagacgcgccagattcagcaggaagctgcggttgtcgttcacgcgacgaatcgcggcttcgctgcagccgcgcagcagcagctccagcggcttacctggggcgatgttcatttccgcacggatgttacgcacggcgacgatcgcttgcttcagccattcggtatcggccagcgccgcttcgtcaacctgagacgcatcgtactgcgggaacggctgcagcatgatggtatcggcagtgataccgcaaatgaccttcacgcgctgccagatggtctcggtgatgaacggaataatcggatgcgccaggcgcagcagaccttccagaacggtcaccagcgtgtgacgggtgccgcgcagctcagactcggaaccgccgttcattaccggcttggttagctccagataccagtcgcagaactggttccaggtgaactcgtacagaatgcctgcggcaatatcgaagcggaagccgtccagcgcttcgcggtaggctttgatggtttggttgaattccgccaggatccagcggtccgccagcgacagggtcatctcgccgccgttaaagccgcaatcctgatcttcggtattcatcagcacaaagcggctggcgttccacagcttgttgcagaagttacggtaaccttccagacgcttcatatcccagttgatatcgcggccggtagaggccagcgccgccagggtaaagcgcagggcgtcggtaccgtgcggctcaataccgttcgggaactgcttctcggtacgtttggcgattttttccgccagctgcggctgcatcatgttaccggtgcgtttttccagcagctccggcagggaaatgccgtcgaccatatccagcgggtcgataacgttgcccttcgatttggacatcttctggccttcgtcatcgcggatcaaaccggtcatatagacggttttaaacggcacctgcggcttgccgttttcatctttgatgaagtgcatggtcatcatgatcatgcgggcaatccagaagaagatgatgtcgaagccggaaaccatcacgctggtcgggtggaactgacgcagggcatcggtgttttccggccagccgagggtggagaaggtccacagcgcggaggagaaccaggtatcgagaacgtcttcgtcctggcgcagcgccacgtcggcgcccaggttattttcctgacgtacttcgtcttcggtgcggccaacgtagacgttgccgtcgttgtcgtaccatgccgggatgcggtgaccccaccacagctggcgggagatacaccagtcctgaatatcgcgcatccaggagaagtacatgttttcgtactgcttcggcacgaactggatgtcgccgttctccaccgcttcaaccgccggtttagccagcacgtcggcgcggacgtaccactggtcggtcagcatcggctcaattaccacgccgccgcggtcgccgtacggaacggtcagatcgtgcggtttaatctcgtccagcaggcccagggcgtcgatagcggcaaccaccgctttacgcgcggcaaagcgctccagcttctggaactccgccgggatggcgtttgagtagacatcggactcgttgcctttggtgtcgtaaacttccgcggtttcgcggatgtcgccgtcaaaggtcaggatgttgatcatcggcagcgcatgacgcttgcccacttcatagtcgttaaagtcgtgcgccggggtgatcttcacgcagccggtgcccttttccatatcggcgtgttcatcgcccacaatcggaatgcggcggtcaaccagcggcaggatcacgaatttaccgataaggtctttatagcgcggatcttccgggttaacggccacgccggtatcgcccagcaccgtctccggacgggtggtggcgacgaccagataatctttaccgtcagcggttttcgcgccgtcggccagcggatagcggatatgccacatcgagcctttagactcgcggttttccacttccagatcggagatggcggtgcgcagtttcgggtcccagttgaccaggcgcttgccgcggtagatcagatcttctttgtacaggcggacaaagacttcttttacggcgttggacaggccttcgtccatggtgaagcgctcgcgctcccagtccacggagttgcccaggcggcgcatctgacgggtaatggtgccgccggattccgctttccactgccagattttatcgataaaggcgtcgcgaccgtagtcgtggcgggttttaccttcttcggcggcaatcttacgctcaaccaccatctgggtagcgatacccgcgtggtcggtaccggcctgccacagggtgtttttaccctgcatgcgctggtagcgaatcatggtatccatgatggtttgctggaaggcatgacccatatgcaaactgccggtgacgttcggcggcgggatcatgatgcagaaactttcctggctttcgtcgccattgggtttgaaatagccctgcttttcccagtgctcgtaaagcggctgttcgatatcttgggggttgtatgtcttttccattatttccaggttgccgtgttcaggttgaaaccagccatgcggtacgctttatagcgttcgcgcgccagttgtttcaaagaatcttcataagggacgaagtctatcacttctgtgaaagcggtggcaaaatctgcaaagtttagccgcaggctaatcagaatatcccgcgggctgctgttgcgcttttgcggccaggcgatctccaccggcgcgccgccgcgcggaccttctcccgccagattatgcggaacgaaactttccgcgggtcgagcccagagcgcttcgtccagacgaacggcctgctgctcatcttcacaggcgatgagtacccgcttgccgctgcgccaacgttctgcggcaatgtcacacaccagttgttcaacggcgctcaggccgtcttgttgcgtatcattgtccagaagatagaacgttgcgtttttcatatatggggcttcttgtggtgactttaaatgcttaagccgggcggcgctacgctgacccggcctataaacggcatcttttcgttggcccggcaagcgtaacgccgccgggcatcagacggcaattactcttcgccggtaaatccggcgcggttgagcaggaactgcgacagcatcgccaccggacgaccggtcgcgcctttggcttttccggaacgccacgcggtaccggcgatatccaggtgcgcccagttgtacttgcgggtaaagcgcgccaggaagcagcccgcggtaatcgccccgccgggacggccgccgatattggccatatccgcaaagttagactccagctgctcctggaactcgtcgccgagcggcagacgccatgcgcgatcgcccgccagttcggacgcaccgatcagctcgtgggccagcgggttgtggttcgacatcagaccggtgatgtgatggcccagcgcaatcacgcaggcgccggtcagcgtggccacgtcgataacggtttccggctcgaagcgctcaacgtaggtcagcacatcgcacagcaccagacgcccttcggcatcggtgttcagcacttccaccgtttgcccggacatcgtggtcaacacgtcgcctggacgataggcgcggccgcccggcatgttttcacatccggccagcacgccgacaacgttcagcggtagctgaagttcggcaaccatacgcatcacgccgtacaccgccgccgcgccgcacatgtcgtatttcatctcgtccatgccttcggaaggcttgatggagatgccgccggagtcaaaggtcagacctttacccaccagcacgatagggcgcgcgtcttccgccgggttgcctttatattcaataaccgacatcagcgattcattttgcgaaccgttgccgaccgccagataggagttcattcccagctctttcatctgctgttcgccgataacgcgagtaatgacgttcttactgtaggtatcggccagctggcgcgcctgagaggccagataggcggcgttacagatgtttggcggcatattgccgagatctttcgccgctttgatgccggcagcaatcgccagaccgtgctgaatagcgcgttcgccgctggtcagctcgcgacgggttgggacgttgaagaccattttacgcagcgggcgacgcggctcgcttttgttggttttcaactggtcaaagctgtacagcgtctctttggcggtctcgaccgcctgacgcactttccagtagttattgcggcctttgacgtgcagctcggtcaggaagcagacggcttccattgagccggtatcattcagcgtattgattgttttctgaatgacctgcttgtactgacgttcatccagctcgcgctctttgccgcaaccaataagcagaatgcgctctgacagaatgttcggcacatggtgcagcaataaagtctggccaggtttgccttccagctcgccgcgacgcagcagggcgctgatataaccgtcgctaattttatcaagctgttcggcgatgggggagaggcgacgtggttcaaagacgccgaccacgatacaggcgctccgctgcttctccgggctaccgctttttacactgaactccatgcactatgctcctgaatcttaaagacaacagtggtggctacagatatactcgtcgtctttcaagttgcagatgcgttggctgcgcctgctcacccctgtcacttacctgatgtaagctccggggcttcacagtcctgccgcctgcctgcaactcgaaatccatagagtatagaaattgaaagctttcgtaactcatgtccgctgttgtggtgacttcgtgttaatcttaacgttattacggccttggttcgtcagaaaagatcctgatacgcagaaccagcgagtcatttaatcttagcgatgttttcgacgaccaaagagaataaatgacgtttaagccatgaaacaagcaattttcctgcaataaaacgggtttttacgggcgtatttatagtgataatcataagatatctggttcgtgagacgctgaaaagccagttggcgatcctattcatcctgctgctcattttcttttgtcagaaactggtcaggatcctcggcgcggctgttgatggcgatatcccgacaaatctggtgctctcgctgttagggctgggcgtacctgaaatggcgcagcttattctgcccctgagtttattcctcgggctgctgatgacgctgggcaaactgtataccgaaagcgaaattacggtgatgcacgcctgcggcctgagtaaagccgtactggtgaaagccgccatgatcctggcgctctttacgggcgtcgtcgcggcggtcaacgtgatgtgggccggcccctggtcttctcgtcaccaggatgaagtgctggcggaggcgaaagcgaaccccggcatggcggcgctggctcagggccagttccagcaggccagcgacggcagcgcggtgctgtttattgagaacgtcaacggcaaccgcttcagcgacgttttccttgctcagctgcggccgcgaggcaacgcgcgcccgtcggtggtggtcgcggataccggcgagctctcgctgcgtaaagacggctcgcaggtggtgaccatgaatcagggcacccgctttgaaggcaccgcgatgctgcgcgacttccgcattaccgacttcaaaaactatcaggcgatagtcggccatcaggcggtggcttccgacccgaacgataccgagcagatggatatgcgcaccctgtggcataccgataccgatcgcgcccgggcggagctgcactggcgcttcacgctggtggcaacggtgttcatcatggccctgatggtggtgccgctcagcgtggtgaacccgcgccagggccgcgtgctgtcgatgctgccggcgatgctgctctatctggtgttcttcctgctgcaaacgtcgattaaatcgagcggcggtaaaggtaaaatggatccgatggtctggatgtgggcggtaaacctgctctatttcgcgttggccgtgctgttgaacctgtgggatacggtgccgatgcgccgcttccgtgcccgttttaacaaaggagcggcgtgatgcaggcgtttggggtacttgaccgttatatcggtaagacgattttcaataccatcatgatgaccctgttcatgctggtttccctctcgggcatcatcaagtttgtcgaccagctgaaaaaggccgggcagggcaactatgatgcgctgggggccggaatctacacgattctcagcgtgccgaaagatatccaaatcttcttcccgatggcggcgctgctcggcgcgctgctggggctggggatgctggcgcagcgcagcgaactggtggtgatgcaggcttccggctttacccgtctgcaggtggcgctgtcggtgatgaaaaccgcgattccgctggtgctgctgaccatggcgatgggcgagtgggttgccccgcagggcgagcagatggcgcgtaactatcgtgctcagcagatgtacggcggttcgctgctttccactcagcaggggctatgggcgaaagacggccataactttgtgtatatcgagcgggtaaaaggcaacgatgagctgggcggggtgagcatttacgcctttaacgaccagcgccgcttacagtccgttcgctatgccgcttcggcaaagttcgacaccgagaataagctctggcggctgtcgcaggtggatgaatccaacctgactgacccgaaacaggtcaccggaacgcagacggtcagcgggacctggaagaccaacctgacgccggataagctcggcgtggtggcgctggacccggacgcgctgtccatcagcggcctgcacaactatgttacctatctgaagtccagcggtcaggatccgggccgctatcagctcaatatgtggagcaaaatcttccagccgctgtcggtggcggtgatga
